(19) United States
(12) Patent Application Publication
(10) Pub. No.: US 2023/0348863 A1
(43) Pub. Date: Nov. 2, 2023

(54) PURIFICATION MATRICES COMPRISING AAV-BINDING POLYPEPTIDES AND METHODS OF USING THE SAME

(71) Applicants: Isolere Bio, Inc., Durham, NC (US); Duke University

(72) Inventors: Kelli M. LUGINBUHL, Durham, NC (US); Michael DZURICKY, Durham, NC (US); Zachary ELMORE, Durham, NC (US); Aravind ASOKAN, Durham, NC (US)

(73) Assignees: Isolere Bio, Inc., Durham, NC (US); Duke University, Durham, NC (US)

(21) Appl. No.: 17/800,700

(22) PCT Filed: Feb. 19, 2021
(86) PCT No.: PCT/US2021/018812

§ 371 Date: Aug. 18, 2022

Related U.S. Application Data
(60) Provisional application No. 63/081,405, filed on Sep. 22, 2020.
(60) Provisional application No. 62/978,616, filed on Feb. 19, 2020.

(51) Int. Cl. C12N 7/00; C12N 15/86; C07K 14/705; C07K 14/78

(52) U.S. Cl. CPC C12N 7/00; C12N 15/86; C07K 14/705; C07K 14/78; C12N 2750/14143; C12N 2750/14151; C07K 2319/00

(57) ABSTRACT

Disclosed herein are purification matrices comprising adeno-associated virus (AAV)-binding polypeptides and methods of using the same.

### CROSS-REFERENCE TO RELATED APPLICATIONS

[0001] This application claims priority to U.S. Provisional Application No. 63/081,405, filed Sep. 22, 2020 and U.S. Provisional Application No. 62/978,616, filed Feb. 19, 2020. The contents of each of the aforementioned applications is incorporated by reference herein in its entirety.

### DESCRIPTION OF THE TEXT FILE SUBMITTED ELECTRONICALLY

[0002] The contents of the text file submitted electronically herewith are incorporated herein by reference in their entirety: A computer readable format copy of the Sequence Listing (filename: ISOL_003_02WO_SeqList_ST25.txt, date recorded: Feb. 19, 2021; file size: 1.5 megabytes).

### FIELD

[0003] The present disclosure is generally related to compositions and methods for purification of biologics. More specifically, the disclosure is related to purification matrices comprising adeno-associated virus-binding polypeptides and methods of using the same.

### BACKGROUND OF THE INVENTION

[0004] Adeno-associated virus (AAV) is a promising vehicle for delivery of one or more therapeutic genes in gene therapy. AAV is a small, replication-deficient DNA virus that is capable of integrating into the genome of an infected cell. AAV facilitates persistent expression of the therapeutic gene and reduces the need for repeated dosing of a gene therapy vector.

[0005] There are limitations to AAV production and purification methods, however, that make widespread use of AAVs for gene therapy difficult. AAV propagation requires the use of a helper virus, such as adenovirus. The requirement for helper virus complicates purification of AAV particles. Current approaches to AAV particle purification involve lysing of AAV-infected cells using repeated freeze-thaw cycles followed by the use of density gradient centrifugation to fractionate the cell lysate in order to obtain infectious AAV particles, free of cellular contaminants and substantially free of helper virus. Standard purification techniques generally result in very low yields (0.3-5%) of active (infectious) virus. Moreover, it is difficult to obtain AAV compositions that are totally free of the helper virus. Therefore, there exists a need in the art for improved AAV purification methods.

### SUMMARY OF THE INVENTION

[0006] The present disclosure provides purification matrices comprising AAV-binding polypeptides and methods of using the same.

[0007] In some embodiments, the disclosure provides a purification matrix comprising an AAV-binding polypeptide coupled to a polypeptide having phase behavior, wherein the AAV-binding polypeptide comprises the ectodomain of the AAV receptor (AAVR), or an AAV-binding fragment or derivative thereof. In some embodiments, the AAV binding polypeptide is reversibly coupled to the polypeptide having phase behavior. In some embodiments, the AAV binding polypeptide is covalently coupled to the polypeptide having phase behavior.

[0008] In some embodiments, the AAVR is a human AAVR. In some embodiments, the AAVR is a monkey AAVR. In some embodiments, the AAVR is an orangutan AAVR. In some embodiments, the AAVR is a mouse AAVR. In some embodiments, the AAVR is a derivative of any one of the human, monkey, orangutan, or mouse AAVRs.

[0009] In some embodiments, the AAVR is a wildtype AAVR. In some embodiments, the AAVR is a mutant AAVR.

[0010] In some embodiments, the AAV-binding polypeptide comprises the sequence of any one of SEQ ID NOs: 29, 33, 52, or 64. In some embodiments, the AAV-binding polypeptide comprises the sequence of any one of SEQ ID NOs: 29, 33, 52, or 64 with up to 25 amino acid mutations.

[0011] In some embodiments, the AAV-binding polypeptide comprises amino acids 411 to 499 of SEQ ID NO: 35 with at least one, at least two, at least three, at least four, or at least five mutations. In some embodiments, each mutation is individually selected from the group consisting of V440H, S431H, Q432H, T434H, Y442H, I462H, D435H, D436H, K438H, and 1439H.

[0012] In some embodiments, the AAV-binding polypeptide comprises any one of SEQ ID NOs: 28-32, 37-41, 43-47, and 52-86. In some embodiments, the AAV-binding polypeptide comprises at least two, at least three, at least four, or at least five of SEQ ID NOs: 28-32, 37-41, 43-47, and 52-86.

[0013] In some embodiments, the AAV-binding polypeptide comprises a polycystic kidney disease 1 (PKD1) domain, or a fragment thereof. In some embodiments, the AAV-binding polypeptide comprises a polycystic kidney disease 2 (PKD2) domain, or a fragment thereof. In some embodiments, the AAV-binding polypeptide comprises a polycystic kidney disease 3 (PKD3) domain, or a fragment thereof. In some embodiments, the AAV-binding polypeptide comprises a polycystic kidney disease 4 (PKD4) domain, or a fragment thereof. In some embodiments, the AAV-binding polypeptide comprises a polycystic kidney disease 5 (PKD5) domain, or a fragment thereof.

[0014] In some embodiments, the AAV-binding polypeptide comprises a sequence of SEQ ID NO: 29. In some embodiments, the AAV-binding polypeptide comprises a sequence of SEQ ID NO: 29, wherein at least one amino acid (i.e., a non-histidine amino acid) is mutated to histidine.

[0015] In some embodiments, the disclosure provides a purification matrix comprising an AAV-binding polypeptide coupled to a support, wherein the AAV-binding polypeptide comprises the ectodomain of the AAV receptor (AAVR), or an AAV-binding fragment or derivative thereof. In some embodiments, the support comprises a bead, a resin, a membrane, a fiber, a polymer, a plate, or a chip. In some embodiments, the support is a bead comprising sepharose, agarose, cellulose, polystyrene, polymethacrylate, and/or polyacrylamide. In some embodiments, the support is a magnetic bead. In some embodiments, the support is a polymer. In some embodiments, the support is a synthetic polymer.

[0016] In some embodiments, the AAV binding polypeptide is reversibly coupled to the support. In some embodiments, the AAV binding polypeptide is reversibly coupled to the polypeptide having phase behavior. In some embodiments, the AAV binding polypeptide is covalently coupled to the support. In some embodiments, the AAV binding polypeptide is covalently coupled to the polypeptide with phase behavior. In some embodiments, the AAV binding polypeptide is non-covalently coupled to the support. In some embodiments, the AAV binding polypeptide is non-covalently coupled to the polypeptide with phase behavior.

[0017] In some embodiments, the AAV binding polypeptide is coupled to the support via a linker. In some embodiments, the AAV binding polypeptide is coupled to the polypeptide with phase behavior via a linker. In some embodiments, the linker is a peptide linker. In some embodiments, the peptide linker comprises a protease cleavage site. In some embodiments, the linker is a chemical linker.

[0018] In some embodiments, a fusion protein comprises the AAV binding polypeptide and the polypeptide having phase behavior.

[0019] In some embodiments, the polypeptide having phase behavior is an elastin-like polypeptide. In some embodiments, the polypeptide having phase behavior is a resilin-like polypeptide.

[0020] In some embodiments, the polypeptide with phase behavior comprises a pentapeptide repeat having the sequence (Val-Pro-Gly-Xaa-Gly)ₙ (SEQ ID NO: 10), or a randomized, scrambled analog thereof; wherein Xaa can be any amino acid except proline. In some embodiments, the polypeptide with phase behavior comprises a pentapeptide repeat having the sequence (Val-Pro-Gly-Xaa-Gly)ₙ (SEQ ID NO: 10), or a randomized, scrambled analog thereof; wherein Xaa can be any amino acid except proline, wherein n is an integer between 1 and 360, inclusive of endpoints. In some embodiments, the polypeptide with phase behavior comprises an amino acid sequence selected from: (GRGDSPY)ₙ (SEQ ID NO: 1); (GRGDSPH)ₙ (SEQ ID NO: 2); (GRGDSPV)ₙ (SEQ ID NO: 3); (GRGDSPYG)ₙ(SEQ ID NO: 4); (RPLGYDS)ₙ (SEQ ID NO: 5); (RPAGYDS)ₙ(SEQ ID NO: 6); (GRGDSYP)ₙ (SEQ ID NO: 7); (GRGDSPYQ)ₙ (SEQ ID NO: 8); (GRGNSPYG)ₙ (SEQ ID NO: 9); (GVGVP)ₙ (SEQ ID NO: 11); (GVGVPGLGVPGVGVPGLGVPGVGVP)ₘ (SEQ ID NO: 12); (GVGVPGVGVPGAGVPGVGVPGVGVP)ₙ (SEQ ID NO: 13); (GVGVPGWGVPGVGVPGWGVPGVGVP)ₘ (SEQ ID NO: 14); (GVGVPGVGVPGVGVPGVGVPGVGVPGVGVPGEGVPGFGVPGVGVP)ₘ (SEQ ID NO: 15); (GVGVPGVGVPGVGVPGVGVPGVGVPGVGVPGKGVPGFGVPGVGVP)ₘ (SEQ ID NO: 16); and (GAGVPGVGVPGAGVPGVGVPGAGVP)ₘ (SEQ ID NO: 17); or a randomized, scrambled analog thereof; wherein: n is an integer in the range of 20-360; and m is an integer in the range of 4-25. In some embodiments, the polypeptide with phase behavior comprises an amino acid sequence of (GVGVPGVGVPGAGVPGVGVPGVGVP)ₘ (SEQ ID NO: 144) or (GVGVPGVGVPGLGVPGVGVPGVGVP)ₘ(SEQ ID NO: 146), wherein m is an integer between 2 and 32, inclusive of endpoints. In some embodiments, the polypeptide with phase behavior comprises an amino acid sequence of (GVGVPGAGVP)ₘ (SEQ ID NO: 145), wherein m is an integer between 5 and 80, inclusive of endpoints. In some embodiments, the polypeptide with phase behavior comprises an amino acid sequence of (GXGVP)ₘ (SEQ ID NO: 147), wherein m is an integer between 10 and 160, inclusive of endpoints, and wherein X for each repeat is independently selected from the group consisting of glycine, alanine, valine, isoleucine, leucine, phenylalanine, tyrosine, tryptophan, lysine, arginine, aspartic acid, glutamic acid, and serine. In some embodiments, the polypeptide with phase behavior comprises an amino acid sequence selected from (GVGVP)ₘ(SEQ ID NO: 143), (ZZPXXXXGZ)ₘ(SEQ ID NO: 148), (ZZPXGZ)ₘ (SEQ ID NO: 149), (ZZPXXGZ)ₘ (SEQ ID NO: 150), or (ZZPXXXGZ)ₘ (SEQ ID NO: 151), wherein m is an integer between 10 and 160, inclusive of endpoints, wherein X if present is any amino acid except proline or glycine, and wherein Z if present is any amino acid. In some embodiments, the polypeptide with phase behavior comprises an amino acid sequence of (GRGDXPZX)ₘ (SEQ ID NO: 152) or (XZPXDGRG)ₘ (SEQ ID NO: 153), wherein X is glutamine or serine, Z is tyrosine or valine, and m is an integer between 10 and 160, inclusive of endpoints.

[0021] In some embodiments, the purification matrix comprises an AAV binding polypeptide having an amino acid sequence of SEQ ID NO: 29, SEQ ID NO: 52, or SEQ ID NO: 64 and a polypeptide with phase behavior comprising an amino acid sequence of (GVGVPGLGVPGVGVPGLGVPGVGVP)ₘ (SEQ ID NO: 12), wherein m is 16. In some embodiments, the purification matrix comprises an amino acid sequence of SEQ ID NO: 87.

[0022] In some embodiments, the disclosure provides a method for purifying an AAV, the method comprising contacting the AAV with a purification matrix described herein.

[0023] In some embodiments, the AAV comprises a wildtype AAV capsid protein. In some embodiments, the AAV comprises a mutant AAV capsid protein. In some embodiments, the AAV comprises a capsid protein of any one of the following serotypes: AAV1, AAV2, AAV3, AAV4, AAV5, AAV6, AAV7, AAV8, AAV9, AAV10, AAV11, AAV12, AAVrh8, AAVrh10, AAVrh32.33, AAVrh74, Avian AAV or Bovine AAV.

[0024] In some embodiments, the AAV reversibly binds to the purification matrix to form an AAV-purification matrix complex. In some embodiments, the method comprises separating the AAV-purification matrix complex from one or more impurities. In some embodiments, the AAV-purification matrix complex is separated from the one or more impurities by washing the AAV-purification matrix complex.

[0025] In some embodiments, the method comprises eluting the AAV from the AAV-purification matrix complex. In some embodiments, the method comprises eluting the AAV by changing the pH of a composition comprising the AAV-purification matrix complex. In some embodiments, the method comprises eluting the AAV by changing the temperature of a composition comprising the AAV-purification matrix complex. In some embodiments, the method comprises eluting the AAV by changing the ionic strength of a composition comprising the AAV-purification matrix complex. In some embodiments, the method comprises eluting the AAV by the addition of a reducing agent to a composition comprising the AAV-purification matrix complex.

[0026] In some embodiments, the method comprises using a first environmental factor to increase the size of the AAV-purification matrix complex. In some embodiments, the first environmental factor comprises one or more of: a.) a change in one or more of temperature, pH, salt concentration or pressure; b.) the addition of one or more surfactants, cofactors, vitamins, molecular crowding agents, enzymes, denaturing agents; or c.) the application of electromagnetic or acoustic waves.

[0027] In some embodiments, the method comprises separating the AAV-purification matrix complex from at least one impurity on the basis of size. In some embodiments, the AAV-purification matrix complex is separated from at least one impurity on the basis of diameter. In some embodiments, the AAV-purification matrix complex is separated from at least one impurity on the basis of mass. In some embodiments, the separation on the basis of size is performed using tangential flow filtration, analytical ultracentrifugation, membrane chromatography, high performance liquid chromatography, normal flow filtration, acoustic wave separation, centrifugation, counterflow centrifugation, and fast protein liquid chromatography.

[0028] In some embodiments, a second environmental factor is used to elute the AAV from the AAV-purification matrix complex. In some embodiments, the second environmental factor comprises one or more of: a change in one or more of temperature, pH, salt concentration or pressure; the addition of one or more surfactants, cofactors, vitamins, molecular crowding agents, denaturing agents, enzymes; or the application of electromagnetic or acoustic waves. In some embodiments, the methods of the disclosure are completed in about 2 hours to about 10 hours.

[0029] In some embodiments, the purification methods described herein are completed in about 4 hours to about 8 hours.

[0030] In some embodiments, a composition comprises an AAV particle purified according to a method of the disclosure. In some embodiments, the composition is at least 70%, at least 80%, at least 85%, at least 90%, at least 95%, at least 96%, at least 97%, at least 98%, or at least 99% free of impurities.

[0031] In some embodiments, an AAV binding polypeptide comprises the sequence of any one of SEQ ID NOs: 28-47, 52, or 64, or a sequence of any one of SEQ ID NOs: 28-47, 52 or 64 with at least one amino acid mutation.

[0032] Also provided herein are nucleic acids encoding one or more AAV binding polypeptides described herein.

[0033] Also provided herein are vectors comprising a nucleic acid encoding one or more AAV binding polypeptides described herein.

[0034] Also provided herein are compositions comprising an AAV binding polypeptide, nucleic acid encoding an AAV binding polypeptide, and/or a vector comprising a nucleic acid encoding an AAV binding polypeptide disclosed herein.

[0035] Also provided herein are kits comprising an AAV binding polypeptide, nucleic acid encoding an AAV binding polypeptide, and/or a vector comprising a nucleic acid encoding an AAV binding polypeptide disclosed herein.

[0036] Also provided herein is a method of increasing yield of AAV particles during production thereof, the method comprising culturing AAV-producing cells in the presence of a purification matrix. In some embodiments, at least about 10 μM of purification matrix is present. In some embodiments, at least about 10 μM of purification matrix is present. In some embodiments, the AAV particles are wildtype AAV particles of any one of the following serotypes: AAV1, AAV2, AAV3, AAV4, AAV5, AAV6, AAV7, AAV8, AAV9, AAV10, AAV11, AAV12, AAVrh8, AAVrh10, AAVrh32.33, AAVrh74, Avian AAV or Bovine AAV. In some embodiments, the AAV particles are mutant AAV particles. In some embodiments, the AAV particles reversibly bind to the purification matrix to form an AAV-purification matrix complex.

[0037] Also provided herein is a method of stabilizing AAV particles during production thereof, the method comprising culturing AAV-producing cells in the presence of a purification matrix. In some embodiments, at least about 10 μM of purification matrix is present. In some embodiments, at least about 10 μM of purification matrix is present. In some embodiments, the AAV particles are wildtype AAV particles of any one of the following serotypes: AAV1, AAV2, AAV3, AAV4, AAV5, AAV6, AAV7, AAV8, AAV9, AAV10, AAV11, AAV12, AAVrh8, AAVrh10, AAVrh32.33, AAVrh74, Avian AAV or Bovine AAV. In some embodiments, the AAV particles are mutant AAV particles. In some embodiments, the AAV particles reversibly bind to the purification matrix to form an AAV-purification matrix complex.

[0038] Also provided herein is a method of stabilizing AAV particles during purification thereof, the method comprising contacting the AAV particles with a purification matrix during purification thereof. In some embodiments, at least about 10 μM of purification matrix is present during purification of the AAV particles. In some embodiments, at least about 50 μM of purification matrix is present during purification of the AAV particles. In some embodiments, the AAV particles are wildtype AAV particles of any one of the following serotypes: AAV1, AAV2, AAV3, AAV4, AAV5, AAV6, AAV7, AAV8, AAV9, AAV10, AAV11, AAV12, AAVrh8, AAVrh10, AAVrh32.33, AAVrh74, Avian AAV or Bovine AAV. In some embodiments, the AAV particles are mutant AAV particles. In some embodiments, the AAV particles reversibly bind to the purification matrix to form an AAV-purification matrix complex.

[0039] Also provided herein is a method of stabilizing AAV particles during storage thereof, the method comprising storing the AAV particles in the presence of a purification matrix. In some embodiments, at least about 10 μM of purification matrix is present during purification of the AAV particles. In some embodiments, at least about 50 μM of purification matrix is present during purification of the AAV particles. In some embodiments, the AAV particles are wildtype AAV particles of any one of the following serotypes: AAV1, AAV2, AAV3, AAV4, AAV5, AAV6, AAV7, AAV8, AAV9, AAV10, AAV11, AAV12, AAVrh8, AAVrh10, AAVrh32.33, AAVrh74, Avian AAV or Bovine AAV. In some embodiments, the AAV particles are mutant AAV particles. In some embodiments, the AAV particles reversibly bind to the purification matrix to form an AAV-purification matrix complex.

[0040] Also provided herein is a method of increasing the shelf-life of AAV particles, the method comprising storing the AAV particles in the presence of a purification matrix. In some embodiments, at least about 10 μM of purification matrix is present during purification of the AAV particles. In some embodiments, at least about 50 μM of purification matrix is present during purification of the AAV particles. In some embodiments, the AAV particles are wildtype AAV particles of any one of the following serotypes: AAV1, AAV2, AAV3, AAV4, AAV5, AAV6, AAV7, AAV8, AAV9, AAV10, AAV11, AAV12, AAVrh8, AAVrh10, AAVrh32.33, AAVrh74, Avian AAV or Bovine AAV. In some embodiments, the AAV particles are mutant AAV particles. In some embodiments, the AAV particles reversibly bind to the purification matrix to form an AAV-purification matrix complex.

[0041] These and other embodiments will be further described below in the Detailed Description, Examples, and Claims.

### BRIEF DESCRIPTION OF THE DRAWINGS

[0042] FIG. 1 shows the percentage of AAV particles captured from cellular supernatant using a purification matrix, as determined by quantitative polymerase chain reaction (qPCR).

[0043] FIG. 2 shows the percentage of AAV particles eluted from the purification matrix, as determined by qPCR, using various elution conditions (e.g., second environmental factors).

[0044] FIG. 3 provides an image of a silver-stained gel containing samples of (1) unpurified cellular supernatant, and (2) a sample comprising AAV particles purified according to the methods of the disclosure. In the sample containing AAV particles, bands for Vp1, Vp2, and Vp3 proteins were observed at the expected sizes (i.e., 87 kDa, 72 kDa, and 62 kDa, respectively).

[0045] FIG. 4 provides an image of a Western Blot, showing that AAV VP1, VP2, and VP3 capsid proteins present in cellular supernatant were successfully captured and removed from the cellular supernatant using a purification matrix described herein.

[0046] FIG. 5A shows pictures of cells infected with a control AAV particle (Pos Ctrl), or an AAV8 particle carrying a tdTomato transgene that was either (i) not purified by the methods of the disclosure (Pos Ctrl) or (ii) purified with a purification matrix of the disclosure (e.g. ViraTag™). Both control AAV and AAV purified with ViraTag™ are infectious. The image labeled “Neg Ctrl” shows cells which were not infected with any AAV particles.

[0047] FIG. 5B shows the fluorescence intensity of cells infected with a control AAV particle (Pos Ctrl) or an AAV particle purified using a purification matrix as described herein (e.g. ViraTag™). Both types of AAV particles tested carried a tdTomato transgene.

[0048] FIG. 6 is a graph that shows the tangential flow filtration flux and transmembrane pressure during the separation of an AAV9-purification matrix complex from impurities. The purification matrix can efficiently purify AAV9 particles with tangential flow filtration (TFF) in concentration-diafiltration-concentration-diafiltration (CDCD) mode. The process is performed at high flux and with a low and stable transmembrane pressure (TMP) in permeate-control mode.

[0049] FIG. 7 is a western blot, which shows the presence or absence of VP1, VP2, and VP3 proteins of AAV, at different steps of the tangential flow filtration (TFF) process. The first lane, labeled SM (starting material) shows the presence of AAV particles in the starting material. The SM is supernatant from cultured HEK293 cells producing a recombinant AAV9 vector packaging a tdTomato transgene that is treated with 10 U/mL benzonase and 0.01% pluronic acid. The second lane, labeled C (P), shows the absence of AAV particles in the permeate. The third lane, labeled C (R), shows the presence of AAV particles in the retentate. The fourth lane, labeled W(P), shows the absence of AAV particles in the wash containing removed contaminants. The fifth lane, labeled E(P), shows the eluted AAV particles.

[0050] FIG. 8 is a graph showing quantitation of contaminant host cell proteins (HCP) within a composition containing an AAV-purification matrix complex during TFF concentration and diafiltration. The composition containing the AAV-purification matrix complex is referred to as SM or “starting material” and contains AAV particles of serotype AAV9. Throughout the concentration and diafiltration stages of TFF, 1 mL fractions are collected. DV1, DV2, DV3-4, DV5-6, DV7-8, and DV9-10 refer to fractions collected during the concentration stage of TFF. W1-2, W3-4, and W5-6 refer to fractions collected during the washing stage of diafiltration. EC, E1, E2, E3, and E4 refer to fractions collected during the elution stage of diafiltration.

[0051] FIG. 9 is a graph showing the concentration of double stranded DNA (dsDNA) impurities in a composition comprising AAV9 particles before purification with a purification matrix (referred to as starting material (SM)) and after purification with a purification matrix (referred to as “elution”).

[0052] FIG. 10 is a graph that shows the effect of a composition of AAV8 particles on a purification matrix's “AAV Capture Efficiency.” The compositions comprising AAV8 particles included compositions from the cell lysate of HEK293 cells producing AAV8 particles, referred to as lysate,” and compositions comprising media harvested from HEK293 cells producing AAV8 particles, referred to as “supernatant”. The compositions contained viral titers of 1×10⁷ viral particles per microliter (vp/uL) (referred to as “E7”), 1×10⁸ vp/uL, or 1×10¹⁰ vp/uL. The compositions were clarified (+) or not clarified (−). The compositions were exposed to nuclease (+) or not exposed to nuclease (−). A purification matrix was used to capture AAV8 particles from each composition. The AAV Capture Efficiency for each sample was calculated using the following equation: 100×(# of AAV8 particles captured by the purification matrix # of AAV8 particles in the composition before purification).

[0053] FIG. 11 provides an image of a silver stained SDS-PAGE gel, which shows that purification of AAV8 particles with purification matrix yields highly pure AAV8 particles, regardless of pre-treatment with benzonase nuclease. (−) indicates no pre-treatment with benzonase nuclease was performed, and (+) indicates that pre-treatment was performed.

[0054] FIG. 12 is a graph that shows dsDNA concentration in AAV8 samples with (+) or without (−) benzonase nuclease pre-treatment. With or without pre-treatment, the compositions comprising purified AAV8 eluted from the purification matrix had similar levels of dsDNA, as assessed by Quant-iT picogreen assay. Lysed SM: starting material comprised of clarified cell lysate; capture: purification matrix capture step supernatant; Elution: purification matrix elution step supernatant.

[0055] FIG. 13 shows AAV Capture Efficiency after centrifugation at various speeds. The figure shows that >95% capture of AAV8 particles is achieved using centrifugation speeds at or greater than 500 relative centrifugal force (RCF), including 3500 and 16000 RCF.

[0056] FIG. 14 shows a comparison of the AAV2 titers produced by HEK293 cell cultures under standard conditions (control) or with the addition of purification matrix as quantified by inverted terminal repeat (ITR) quantitative polymerase chain reaction (qPCR) The data shows that the presence of purification matrix may increase titers by 8% or more. Student's t-test, p=0.077.

[0057] FIG. 15 shows the percent change of total AAV8 capsids after repeated freeze-thaw cycles in a composition comprising AAV8 particles and purification matrix and a composition comprising AAV8 particles and PBS (negative control).

[0058] FIG. 16 is a graph showing the effect of purification matrix concentration on the Capture Efficiency of AAV8 particles. The Capture Efficiency was calculated using the following equation: 100×(# of AAV8 particles captured by the purification matrix/# of AAV8 particles in the composition before purification).

### DETAILED DESCRIPTION OF THE INVENTION

### Definitions

[0059] As used herein, and in the appended claims, the singular forms “a”, “an”, and “the” include plural referents unless the context clearly dictates otherwise. Thus, for example, reference to “a protein” can refer to one protein or to mixtures of such protein, and reference to “the method” includes reference to equivalent steps and/or methods known to those skilled in the art, and so forth.

[0060] As used herein, the term “about” or “approximately” when preceding a numerical value indicates the value plus or minus a range of 10%. For example, “about 100” encompasses 90 and 110.

[0061] Also as used herein, “and/or” refers to and encompasses any and all possible combinations of one or more of the associated listed items, as well as the lack of combinations when interpreted in the alternative (“or”).

[0062] Unless the context indicates otherwise, it is specifically intended that the various features described herein can be used in any combination.

[0063] Moreover, the present disclosure also contemplates that in some embodiments, any feature or combination of features set forth herein can be excluded or omitted. To illustrate further, if, for example, the specification indicates that a particular amino acid can be selected from A, G, I, L and/or V, this language also indicates that the amino acid can be selected from any subset of these amino acid(s) for example A, G, I or L; A, G, I or V; A or G; only L; etc., as if each such subcombination is expressly set forth herein. Moreover, such language also indicates that one or more of the specified amino acids can be disclaimed. For example, in particular embodiments the amino acid is not A, G or I; is not A; is not G or V; etc., as if each such possible disclaimer is expressly set forth herein.

[0064] An “adeno-associated virus” (AAV) is a small, replication-deficient parvovirus. As used herein, AAV may refer to a wildtype or mutant AAV of any one of the following serotypes: AAV1, AAV2, AAV3 (including types 3A and 3B), AAV4, AAV5, AAV6, AAV7, AAV8, AAV9, AAV10, AAV11, AAV12, AAV13, AAVrh32.33, AAVrh8, AAVrh10, AAVrh74, AAVhu.68, avian AAV, bovine AAV, canine AAV, equine AAV, ovine AAV, snake AAV, bearded dragon AAV, AAV2i8, AAV2g9, AAV-LK03, AAV7m8, AAV Anc80, AAV PHP.B, and any other AAV now known or later discovered. In some embodiments, an AAV may have a single-stranded genome, or a double-stranded genome (e.g., a self-complementary AAV).

[0065] An “AAV particle” typically comprises a capsid, and a nucleic acid (e.g., a nucleic acid comprising a transgene) encapsidated by the protein capsid. The “capsid” is a near-spherical protein shell that comprises individual “capsid protein subunits” or “capsid proteins” (e.g., about 60 capsid protein subunits) associated and arranged with T=1 icosahedral symmetry. Accordingly, the capsids of the AAV vectors described herein comprise a plurality of capsid proteins. When an AAV particle is described as comprising a capsid protein, it will be understood that the AAV particle comprises a capsid, wherein the capsid comprises one or more AAV capsid proteins. When an AAV particle is described as binding to a binding domain, it will be understood that the binding domain may bind to one or more capsid proteins within the capsid. The term “empty AAV particle” or “empty capsid” refers to an AAV particle or capsid that does not comprise any vector genome or nucleic acid comprising an expression cassette or transgene.

[0066] As used herein, the term “AAV sample” used interchangeably herein with “AAV composition” refers to a composition that contains AAV particles. In some embodiments, the “AAV sample” refers to a composition containing AAV of a particular serotype. For example, an “AAV8 sample” refers to a composition comprising AAV8 particles.

[0067] As used herein, the term “contaminant” and “impurity” are used interchangeably. A contaminant may refer to any substance that is not desired in a purified composition. In some embodiments, the contaminant is any substance other than the biologic desired to be purified. Non-limiting examples of contaminants include, but are not limited to, a solvent, a protein, a peptide, a carbohydrate, a nucleic acid, a virus, a cell (e.g., a bacterial, yeast, or mammalian cell), a carbohydrate, a lipid, or a lipopolysaccharide. In some embodiments, the contaminant is an endotoxin or a mycotoxin.

[0068] As used herein, the term “fragment” as it refers to a protein or polypeptide includes a truncated form of the protein or polypeptide. For example, a fragment of AAVR may include about 1%, about 5%, about 10%, about 15%, about 20%, about 25%, about 30%, about 35%, about 40%, about 45%, about 50%, about 55%, about 60%, about 65%, about 70%, about 75%, about 80%, about 85%, about 90%, about 95%, about 97%, or about 99% of the amino acids of full-length AAVR.

[0069] As used herein, the terms “peptide,” “polypeptide,” and “protein” are used interchangeably, and refer to a compound comprised of amino acid residues covalently linked by peptide bonds. A protein must contain at least two amino acids, and no limitation is placed on the maximum number of amino acids that can comprise a protein's sequence. The term “peptide” may refer to a short chain of amino acids including, for example, natural peptides, recombinant peptides, synthetic peptides, or a combination thereof. Proteins and peptides may include, for example, biologically active fragments, substantially homologous polypeptides, oligopeptides, homodimers, heterodimers, variants of polypeptides, modified polypeptides, derivatives, analogs, and fusion proteins, among others.

[0070] A “polynucleotide” is a sequence of nucleotide bases, and may be RNA, DNA or DNA-RNA hybrid sequences (including both naturally occurring and non-naturally occurring nucleotides). In some embodiments, a polynucleotide is either a single or double stranded DNA sequence.

[0071] As used herein, by “isolate” or “purify” (or grammatical equivalents) a viral particle, it is meant that the viral particle is at least partially separated from at least some of the other components in a starting material comprising the viral particle (e.g., a cell lysate). In representative embodiments an “isolated” or “purified” viral particle is enriched by at least about 10-fold, about 100-fold, about 1000-fold, about 10,000-fold or more as compared with the starting material.

[0072] As used herein, the term “amino acid” encompasses any naturally occurring amino acid, modified forms thereof, and synthetic amino acids. Naturally occurring, levorotatory (L-) amino acids are shown in Table 1.

TABLE 1
Amino acid residues and abbreviations.

| | Abbreviation | |
|---|---|---|
| | Three-Letter | One-Letter |
| Amino Acid Residue | Code | Code |
| Alanine | Ala | A |
| Arginine | Arg | R |
| Asparagine | Asn | N |
| Aspartic acid (Aspartate) | Asp | D |
| Cysteine | Cys | C |
| Glutamine | Gln | Q |
| Glutamic acid (Glutamate) | Glu | E |
| Glycine | Gly | G |
| Histidine | His | H |
| Isoleucine | Ile | I |
| Leucine | Leu | L |
| Lysine | Lys | K |
| Methionine | Met | M |
| Phenylalanine | Phe | F |
| Proline | Pro | P |
| Serine | Ser | S |
| Threonine | Thr | T |
| Tryptophan | Trp | W |
| Tyrosine | Tyr | Y |
| Valine | Val | V |

[0073] Alternatively, the amino acid can be a modified amino acid residue (nonlimiting examples are shown in Table 2) and/or can be an amino acid that is modified by post-translational modification (e.g., acetylation, amidation, formylation, hydroxylation, methylation, phosphorylation or sulfatation).

TABLE 2
Modified Amino Acid Residues.

| | |
|---|---|
| Modified Amino Acid Residue | Abbreviation |

Amino Acid Residue Derivatives

| | |
|---|---|
| 2-Aminoadipic acid | Aad |
| 3-Aminoadipic acid | bAad |
| beta-Alanine, beta-Aminoproprionic acid | bAla |
| 2-Aminobutyric acid | Abu |
| 4-Aminobutyric acid, Piperidinic acid | 4Abu |
| 6-Aminocaproic acid | Acp |
| 2-Aminoheptanoic acid | Ahe |
| 2-Aminoisobutyric acid | Aib |
| 3-Aminoisobutyric acid | bAib |
| 2-Aminopimelic acid | Apm |
| t-butylalanine | t-BuA |
| Citrulline | Cit |
| Cyclohexylalanine | Cha |
| 2,4-Diaminobutyric acid | Dbu |
| Desmosine | Des |
| 2,21-Diaminopimelic acid | Dpm |
| 2,3-Diaminoproprionic acid | Dpr |
| N-Ethylglycine | EtGly |
| N-Ethylasparagine | EtAsn |
| Homoarginine | hArg |
| Homocysteine | hCys |
| Homoserine | hSer |
| Hydroxylysine | Hyl |
| Allo-Hydroxylysine | aHyl |
| 3-Hydroxyproline | 3Hyp |
| 4-Hydroxyproline | 4Hyp |
| Isodesmosine | Ide |
| allo-Isoleucine | aIle |
| Methionine sulfoxide | MSO |
| N-Methylglycine, sarcosine | MeGly |
| N-Methyl isoleucine | MeIle |
| 6-N-Methyllysine | MeLys |
| N-Methylvaline | MeVal |
| 2-Naphthylalanine | 2-Nal |
| Norvaline | Nva |
| Norleucine | Nle |
| Omithine | Orn |
| 4-Chlorophenylalanine | Phe(4-C1) |
| 2-Fluorophenylalanine | Phe(2-F) |
| 3-Fluorophenylalanine | Phe(3-F) |
| 4-Fluorophenylalanine | Phe(4-F) |
| Phenylglycine | Phg |
| Beta-2-thienylalanine | Thi |

[0074] Further, the non-naturally occurring amino acid can be an “unnatural” amino acid.

[0075] As used herein, the term “environmental factor” is any factor that, when applied to a composition comprising a protein-based purification matrix, alters one or more properties of the composition. Non-limiting examples of environmental factors include a change in one or more of temperature, pH, salt concentration, concentration of the purification matrix, concentration of the biologic, or pressure, the addition of one or more surfactants, cofactors, vitamins, molecular crowding agents, denaturing agents, reducing agents, or oxidizing agents; or the application of electromagnetic or acoustic waves.

[0076] As used herein, the term “polypeptide with phase behavior” refers to any polypeptide that is capable of undergoing a phase transition. In some embodiments, the polypeptide undergoes a phase transition due to the application of an environmental factor. Exemplary polypeptides with phase behavior include elastin-like polypeptides (ELPs) and resilin-like polypeptides (RLPs). As used herein, the term “fusion protein” refers to a polypeptide produced when two heterologous nucleotide sequences or fragments thereof coding for two (or more) different polypeptides not found fused together in nature are fused together in the correct translational reading frame.

### Purification Matrices Comprising AAV-Binding Polypeptide

[0077] The disclosure provides purification matrices comprising recombinant adeno-associated virus (AAV)-binding polypeptides. In some embodiments, the disclosure provides methods of purifying adeno-associated virus (AAV) particles comprising contacting the AAV particles with the purification matrices described herein. In some embodiments, the methods described herein yield high titers of AAV particles and remove one or more contaminants from compositions comprising AAV particles.

### Adeno-Associated Viruses (AAV)

[0078] In some embodiments, the purification matrices described herein are utilized to purify AAV particles. AAVs belong to the Dependoparvovirus genus within the Parvoviridae family. AAV has a linear single-stranded DNA (ssDNA) genome of approximately 4.7 kilobases with two 145 nucleotide-long inverted terminal repeats (TTR) at the termini. AAVs do not encode a polymerase and rely on cellular polymerases for genome replication.

[0079] AAV can be propagated as a lytic virus or maintained as a provirus, integrated into host cell DNA. Although under certain conditions AAV can replicate in the absence of helper virus, efficient replication requires coinfection with a helper virus, such as adenovirus, cytomegalovirus, Epstein-Barr virus, or vaccinia virus.

[0080] The compositions and methods disclosed herein may be used to purify a wildtype or mutant AAV particle of any one of the following serotypes: AAV1, AAV2, AAV3 (including types 3A and 3B), AAV4, AAV5, AAV6, AAV7, AAV8, AAV9, AAV10, AAV11, AAV12, AAV13, AAVrh32.33, AAVrh8, AAVrh10, AAVrh74, AAVhu.68, avian AAV, bovine AAV, canine AAV, equine AAV, ovine AAV, snake AAV, bearded dragon AAV, AAV2i8, AAV2g9, AAV-LK03, AAV7m8, AAV Anc80, AAV PHP.B, or any other AAV now known or later discovered.

### AAV-Binding Polypeptides

[0081] In some embodiments, the disclosure provides a purification matrix comprising an AAV-binding polypeptide. In some embodiments, the AAV-binding polypeptide comprises the ectodomain of the AAV receptor (AAVR), or an AAV-binding fragment or derivative thereof.

[0082] The AAVR, also named KIAA0319L (see, e.g., Uniprot Accession No. Q81ZA0), is a 150 kDa glycoprotein which binds to the capsid of multiple AAV serotypes, including AAV1, AAV2, AAV3B, AAV5, AAV6, AAV8, and AAV9. The ectodomain of the AAVR comprises a motif at the N-terminus with eight cysteines (MANEC) and five immunoglobulin domains known as polycystic kidney disease (PKD) domains. AAV particles bind to the PKD domains to facilitate transduction. Thus, in some embodiments, the AAV-binding polypeptides described herein comprise one, two, three, four, or five PKD domains, or fragments or derivatives thereof.

[0083] In some embodiments, the AAV-binding polypeptide comprises the human AAVR (SEQ ID NO: 35), mouse AAVR (SEQ ID NO: 36), or orangutan AAVR (SEQ ID NO: 42), or a fragment or derivative thereof. In some embodiments, the AAV-binding polypeptide comprises a sequence with at least 90% or at least 95% identity to any one of SEQ ID NO: 35, 36, or 42. In some embodiments, the AAV-binding polypeptide comprises an ectodomain of AAVR or a fragment or derivative thereof. In some embodiments, the AAV-binding polypeptide comprises a fragment of the AAVR comprising an N-terminal methionine. In some embodiments, the AAV-binding polypeptide comprises the amino acid sequence of SEQ ID NO: 33. In some embodiments, the AAV-binding polypeptide comprises the amino acid sequence of SEQ ID NO: 34.

[0084] In some embodiments, the AAV-binding polypeptide comprises the sequence of SEQ ID NO: 33 or SEQ ID NO: 34 with at least 1, at least 2, at least 3, at least 4, at least 5, at least 6, at least 7, at least 8, at least 9, at least 10, at least 11, at least 12, at least 13, at least 14, at least 15, at least 16, at least 17, at least 18, at least 19, at least 20, at least 21, at least 22, at least 23, at least 24, at least 25 or more amino acid mutations. In some embodiments, the AAV binding polypeptide comprises the sequence of SEQ ID NO: 33 or SEQ ID NO: 34, or a sequence with at least about 70%, about 75%, about 80%, about 85%, about 90%, about 95%, about 96%, about 97%, about 98%, about 99% identity thereto. Unless otherwise indicated, sequence identity is determined using the National Center for Biotechnology Information (NCBI)'s Basic Local Alignment Search Tool (BLAST*), available at blast.ncbi.nlm.nih.gov/Blast.cgi. In some embodiments, the sequence identity is calculated over the entire length of the compared sequences. In some embodiments, the sequence identity is calculated over a 20-amino acid, 50-amino acid, 75-amino acid, 100-amino acid, 250-amino acid, 500-amino acid, 750-amino acid, or 1000-amino acid fragment of each compared sequence.

[0085] In some embodiments, the AAV-binding polypeptides described herein comprise one or more PKDs, such as two, three, four, five, or more PKDs. In some embodiments, the PKDs are each individually selected from the PKDs listed in Table 3. For example, in some embodiments, the PKDs are each individually selected from SEQ ID NO: 28-32, 37-41, and 43-47. In some embodiments, an AAV-binding polypeptide comprises multiple PKDs, and the PKDs are connected to one another by a linker. Non-limiting examples of linkers are described throughout this disclosure. In some embodiments, an AAV-binding polypeptide comprises multiple PKD domains, wherein each PKD domain has the same or substantially the same sequence. In some embodiments, an AAV-binding polypeptide comprises multiple PKD domains, wherein each PKD has a different sequence.

TABLE 3
Amino Acid Sequences of PKDs

| PKD | SEQ ID NO. |
|---|---|
| Human PKD1 | 28 |
| Human PKD2 | 29 |
| Human PKD3 | 30 |
| Human PKD4 | 31 |
| Human PKD5 | 32 |
| Mouse PKD1 | 37 |
| Mouse PKD2 | 38 |
| Mouse PKD3 | 39 |
| Mouse PKD4 | 40 |
| Mouse PKDS | 41 |
| Orangutan PKD1 | 43 |
| Orangutan PKD2 | 44 |
| Orangutan PKD3 | 45 |
| Orangutan PKD4 | 46 |
| Orangutan PKD5 | 47 |

[0086] In some embodiments, the AAV-binding polypeptides comprise a polycystic kidney disease 1 (PDK1) domain. In some embodiments, the AAV-binding polypeptides comprise a polycystic kidney disease 2 (PDK2) domain. In some embodiments, the AAV-binding polypeptides comprise a polycystic kidney disease 3 (PDK3) domain. In some embodiments, the AAV-binding polypeptides comprise a polycystic kidney disease 4 (PDK4) domain. In some embodiments, the AAV-binding polypeptides comprise a polycystic kidney disease 5 (PDK5) domain

[0087] In some embodiments, the AAV-binding polypeptide comprises a PKD1 and a PKD2 domain. In some embodiments, the AAV-binding polypeptide comprises a PKD1 and a PKD2 domain having an amino acid sequence of SEQ ID NO: 92. In some embodiments, the AAV-binding polypeptide comprises a PKD1 and a PKD3 domain. In some embodiments, the AAV-binding polypeptide comprises a PKD1 and a PKD4 domain. In some embodiments, the AAV-binding polypeptide comprises a PKD1 and a PKD5 domain. In some embodiments, the AAV-binding polypeptide comprises a PKD2 and a PKD3 domain. In some embodiments, the AAV-binding polypeptide comprises a PKD2 and a PKD4 domain. In some embodiments, the AAV-binding polypeptide comprises a PKD2 and a PKD5 domain. In some embodiments, the AAV-binding polypeptide comprises a PKD3 and a PKD4 domain. In some embodiments, the AAV-binding polypeptide comprises a PKD3 and a PKD5 domain. In some embodiments, the AAV-binding polypeptide comprises a PKD4 and a PKD5 domain. In some embodiments, the AAV-binding polypeptide comprises three PKD domains, wherein each PKD domain is independently selected from any one of PKD1-5. In some embodiments, the AAV-binding polypeptide comprises four PKD domains, wherein each PKD domain is independently selected from any one of PKD1-5. In some embodiments, the AAV-binding polypeptide comprises five PKD domains, wherein each PKD domain is independently selected from any one of PKD1-5. In some embodiments, the AAV-binding polypeptide comprises more than five PKD domains, wherein each PKD domain is independently selected from any one of PKD1-5.

[0088] In any of the embodiments of the preceding paragraph, each of the PKD domains may be independently selected from a wildtype or a mutant PKD domain. In some embodiments, each PKD may have at least 70%, at least 80%, at least 85%, at least 90%, at least 95%, at least 96%, at least 97%, at least 98%, at least 99%/o, or at least 100% sequence identity to a wild type PKD. In some embodiments, the AAV-binding polypeptides disclosed herein comprise an amino acid sequence with at least about 70%, at least about 75%, at least about 80%, at least about 85%, at least about 90%/o, or at least about 95% sequence identity to a wild type PKD. In some embodiment, the AAV-binding polypeptides bind to AAV using one or more PKDs.

[0089] In some embodiments, the AAV-binding polypeptides described herein comprise at least about 1, at least about 2, at least about 3, at least about 4, at least about 5, at least about 6, at least about 7, at least about 8, at least about 9, at least about 10, at least about 11, at least about 12, at least about 13, at least about 14, at least about 15, at least about 16, at least about 17, at least about 18, at least about 19, at least about 20, at least about 21, at least about 22, at least about 23, at least about 24, at least about 25 amino acid mutations relative to a wild-type AAVR or PKD thereof. In some embodiments, the AAV-binding polypeptides comprise up to about 25 amino acid mutations, or more, relative to a wildtype AAVR or PKD thereof. For example, the AAV binding polypeptides may comprise about 25-35, about 35-45, about 45-55, about 55-65, or about 65-75 amino acid mutations relative to a wildtype AAVR.

[0090] In some embodiments, the AAV-binding polypeptides described herein comprise at least about 1, at least about 2, at least about 3, at least about 4, at least about 5, at least about 6, at least about 7, at least about 8, at least about 9, at least about 10, at least about 11, at least about 12, at least about 13, at least about 14, at least about 15, at least about 16, at least about 17, at least about 18, at least about 19, at least about 20, at least about 21, at least about 22, at least about 23, at least about 24, at least about 25 amino acid mutations relative to a wild type AAVR or PKD thereof, wherein each mutation comprises a change of a native amino acid residue to a histidine.

[0091] In some embodiments, the AAV-binding polypeptide comprises a sequence of SEQ ID NO: 29. In some embodiments, the AAV-binding polypeptide comprises a sequence of SEQ ID NO: 29, wherein at least one amino acid (i.e., a non-histidine amino acid) is mutated to histidine.

[0092] In some embodiments, the AAV-binding polypeptide comprises SEQ ID NO; 35 with at least one, at least two, at least three, at least four, or at least five mutations. In some embodiments, each mutation is individually selected from the group consisting of V440H, S431H, Q432H, T434H, Y442H, I462H, D435H, D436H, K438H, and 1439H.

[0093] In some embodiments, the AAV-binding polypeptide comprises amino acids 411 to 499 of SEQ ID) NO: 35 with at least one, at least two, at least three, at least four, or at least five mutations, wherein each mutation is individually selected from the group consisting of V440H, 431H, Q432H, T434H, Y442H, I462H, D435H, D436H, K438H and I439H.

[0094] In some embodiments, the AAV-binding polypeptides of SEQ ID NO: 35 or fragments thereof have one or more of the combinations of mutations in Table 4. Each row in Table 4 signifies a combination of mutations.

TABLE 4
Combinations of Mutations

| Mutation 1 | Mutation 2 | Mutation 3 | Mutation 4 | Mutation 5 |
|---|---|---|---|---|
| S431H | V440H | | | |
| Q432H | V440H | | | |
| Q432H | S431H | | | |
| T434H | V440H | | | |
| T434H | S431H | | | |
| T434H | Q432H | | | |
| Y442H | V440H | | | |
| Y442H | S431H | | | |
| Y442H | Q432H | | | |
| Y442H | T434H | | | |
| I462H | V440H | | | |
| I462H | S431H | | | |
| I462H | Q432H | | | |
| I462H | T434H | | | |
| I462H | Y442H | | | |
| D43SH | V440H | | | |
| D435H | S431H | | | |
| D435H | Q432H | | | |
| D435H | T434H | | | |
| D435H | Y442H | | | |
| D436H | V440H | | | |
| D436H | S431H | | | |
| D436H | Q432H | | | |
| D436H | T434H | | | |
| D436H | Y442H | | | |
| D435H | I462H | | | |
| D436H | I462H | | | |
| D436H | D435H | | | |
| I439H | V440H | | | |
| I439H | S431H | | | |
| I439H | Q432H | | | |
| I439H | T434H | | | |
| I439H | Y442H | | | |
| K438H | V440H | | | |
| K438H | S431H | | | |
| K438H | Q432H | | | |
| K438H | T434H | | | |
| I439H | I462H | | | |
| K438H | Y442H | | | |
| I439H | D435H | | | |
| I439H | D436H | | | |
| K438H | I462H | | | |
| K438H | D435H | | | |
| K438H | D436H | | | |
| I439H | K438H | | | |
| S431H | V440H | Q432H | | |
| S431H | V440H | T434H | | |
| Q432H | V440H | T434H | | |
| Q432H | S431H | T434H | | |
| S431H | V440H | Y442H | | |
| Q432H | V440H | Y442H | | |
| Q432H | S431H | Y442H | | |
| T434H | V440H | Y442H | | |
| T434H | S431H | Y442H | | |
| T434H | Q432H | Y442H | | |
| S431H | V440H | I462H | | |
| Q432H | V440H | I462H | | |
| Q432H | S431H | I462H | | |
| T434H | V440H | I462H | | |
| T434H | S431H | I462H | | |
| T434H | Q432H | I462H | | |
| Y442H | V440H | I462H | | |
| Y442H | S431H | I462H | | |
| Y442H | Q432H | I462H | | |
| Y442H | T434H | I462H | | |
| S431H | V440H | D435H | | |
| Q432H | V440H | D435H | | |
| Q432H | S431H | D435H | | |
| T434H | V440H | D435H | | |
| T434H | S431H | D435H | | |
| T434H | Q432H | D435H | | |
| Y442H | V440H | D435H | | |
| Y442H | S431H | D435H | | |
| Y442H | Q432H | D435H | | |
| Y442H | T434H | D435H | | |
| S431H | V440H | D436H | | |
| Q432H | V440H | D436H | | |
| Q432H | S431H | D436H | | |
| T434H | V440H | D436H | | |
| T434H | S431H | D436H | | |
| T434H | Q432H | D436H | | |
| Y442H | V440H | D436H | | |
| Y442H | S431H | D436H | | |
| Y442H | Q432H | D436H | | |
| Y442H | T434H | D436H | | |
| I462H | V440H | D435H | | |
| I462H | S431H | D435H | | |
| I462H | Q432H | D435H | | |
| I462H | T434H | D435H | | |
| I462H | Y442H | D435H | | |
| I462H | V440H | D436H | | |
| I462H | S431H | D436H | | |
| I462H | Q432H | D436H | | |
| I462H | T434H | D436H | | |
| I462H | Y442H | D436H | | |
| D435H | V440H | D436H | | |
| D435H | S431H | D436H | | |
| D435H | Q432H | D436H | | |
| D435H | T434H | D436H | | |
| D435H | Y442H | D436H | | |
| D435H | I462H | D436H | | |
| S431H | V440H | I439H | | |
| Q432H | V440H | I439H | | |
| Q432H | S431H | I439H | | |
| T434H | V440H | I439H | | |
| T434H | S431H | I439H | | |
| T434H | Q432H | I439H | | |
| Y442H | V440H | I439H | | |
| Y442H | S431H | I439H | | |
| Y442H | Q432H | I439H | | |
| Y442H | T434H | I439H | | |
| S431H | V440H | K438H | | |
| Q432H | V440H | K438H | | |
| Q432H | S431H | K438H | | |
| T434H | V440H | K438H | | |
| T434H | S431H | K438H | | |
| T434H | Q432H | K438H | | |
| I462H | V440H | I439H | | |
| I462H | S431H | I439H | | |
| Y442H | V440H | K438H | | |
| I462H | Q432H | I439H | | |
| Y442H | S431H | K438H | | |
| I462H | T434H | I439H | | |
| Y442H | Q432H | K438H | | |
| Y442H | T434H | K438H | | |
| I462H | Y442H | I439H | | |
| D43SH | V440H | I439H | | |
| D435H | S431H | I439H | | |
| D435H | Q432H | I439H | | |
| D435H | T434H | I439H | | |
| D435H | Y442H | I439H | | |
| D436H | V440H | I439H | | |
| D436H | S431H | I439H | | |
| D436H | Q432H | I439H | | |
| D436H | T434H | I439H | | |
| I462H | V440H | K438H | | |
| I462H | S431H | K438H | | |
| I462H | Q432H | K438H | | |
| I462H | T434H | K438H | | |
| D436H | Y442H | I439H | | |
| I462H | Y442H | K438H | | |
| D435H | V440H | K438H | | |
| D435H | S431H | K438H | | |
| D435H | Q432H | K438H | | |
| D435H | T434H | K438H | | |
| D435H | I462H | I439H | | |
| D435H | Y442H | K438H | | |
| D436H | V440H | K438H | | |
| D436H | S431H | K438H | | |
| D436H | Q432H | K438H | | |
| D436H | T434H | K438H | | |
| D436H | I462H | I439H | | |
| D436H | Y442H | K438H | | |
| D436H | D435H | I439H | | |
| D435H | I462H | K438H | | |
| D436H | I462H | K438H | | |
| D436H | D435H | K438H | | |
| I439H | V440H | K438H | | |
| I439H | S431H | K438H | | |
| I439H | Q432H | K438H | | |
| I439H | T434H | K438H | | |
| I439H | Y442H | K438H | | |
| I439H | I462H | K438H | | |
| I439H | D435H | K438H | | |
| I439H | D436H | K438H | | |
| S431H | V440H | Q432H | T434H | |
| S431H | V440H | Q432H | Y442H | |
| S431H | V440H | T434H | Y442H | |
| Q432H | V440H | T434H | Y442H | |
| Q432H | S431H | T434H | Y442H | |
| S431H | V440H | Q432H | I462H | |
| S431H | V440H | T434H | I462H | |
| Q432H | V440H | T434H | I462H | |
| Q432H | S431H | T434H | I462H | |
| S431H | V440H | Y442H | I462H | |
| Q432H | V440H | Y442H | I462H | |
| Q432H | S431H | Y442H | I462H | |
| T434H | V440H | Y442H | I462H | |
| T434H | S431H | Y442H | I462H | |
| T434H | Q432H | Y442H | I462H | |
| S431H | V440H | Q432H | D435H | |
| S431H | V440H | T434H | D435H | |
| Q432H | V440H | T434H | D43SH | |
| Q432H | S431H | T434H | D435H | |
| S431H | V440H | Y442H | D435H | |
| Q432H | V440H | Y442H | D435H | |
| Q432H | S431H | Y442H | D435H | |
| T434H | V440H | Y442H | D435H | |
| T434H | S431H | Y442H | D435H | |
| T434H | Q432H | Y442H | D435H | |
| S431H | V440H | Q432H | D436H | |
| S431H | V440H | T434H | D436H | |
| Q432H | V440H | T434H | D436H | |
| Q432H | S431H | T434H | D436H | |
| S431H | V440H | Y442H | D436H | |
| Q432H | V440H | Y442H | D436H | |
| Q432H | S431H | Y442H | D436H | |
| T434H | V440H | Y442H | D436H | |
| T434H | S431H | Y442H | D436H | |
| T434H | Q432H | Y442H | D436H | |
| S431H | V440H | I462H | D435H | |
| Q432H | V440H | I462H | D435H | |
| Q432H | S431H | I462H | D43SH | |
| T434H | V440H | I462H | D435H | |
| T434H | S431H | I462H | D435H | |
| T434H | Q432H | I462H | D43SH | |
| Y442H | V440H | I462H | D435H | |
| Y442H | S431H | I462H | D435H | |
| Y442H | Q432H | I462H | D435H | |
| Y442H | T434H | I462H | D435H | |
| S431H | V440H | I462H | D436H | |
| Q432H | V440H | I462H | D436H | |
| Q432H | S431H | I462H | D436H | |
| T434H | V440H | I462H | D436H | |
| T434H | S431H | I462H | D436H | |
| T434H | Q432H | I462H | D436H | |
| Y442H | V440H | I462H | D436H | |
| Y442H | S431H | I462H | D436H | |
| Y442H | Q432H | I462H | D436H | |
| Y442H | T434H | I462H | D436H | |
| S431H | V440H | D435H | D436H | |
| Q432H | V440H | D435H | D436H | |
| Q432H | S431H | D435H | D436H | |
| T434H | V440H | D435H | D436H | |
| T434H | S431H | D435H | D436H | |
| T434H | Q432H | D435H | D436H | |
| Y442H | V440H | D435H | D436H | |
| Y442H | S431H | D435H | D436H | |
| Y442H | Q432H | D435H | D436H | |
| Y442H | T434H | D435H | D436H | |
| I462H | V440H | D435H | D436H | |
| I462H | S431H | D435H | D436H | |
| I462H | Q432H | D435H | D436H | |
| I462H | T434H | D435H | D436H | |
| I462H | Y442H | D435H | D436H | |
| S431H | V440H | Q432H | I439H | |
| S431H | V440H | T434H | I439H | |
| Q432H | V440H | T434H | I439H | |
| Q432H | S431H | T434H | I439H | |
| S431H | V440H | Y442H | I439H | |
| Q432H | V440H | Y442H | I439H | |
| Q432H | S431H | Y442H | I439H | |
| T434H | V440H | Y442H | I439H | |
| T434H | S431H | Y442H | I439H | |
| T434H | Q432H | Y442H | I439H | |
| S431H | V440H | Q432H | K438H | |
| S431H | V440H | T434H | K438H | |
| Q432H | V440H | T434H | K438H | |
| Q432H | S431H | T434H | K438H | |
| S431H | V440H | I462H | I439H | |
| Q432H | V440H | I462H | I439H | |
| S431H | V440H | Y442H | K438H | |
| Q432H | S431H | I462H | I439H | |
| T434H | V440H | I462H | I439H | |
| Q432H | V440H | Y442H | K438H | |
| T434H | S431H | I462H | I439H | |
| Q432H | S431H | Y442H | K438H | |
| T434H | V440H | Y442H | K438H | |
| T434H | Q432H | I462H | I439H | |
| T434H | S431H | Y442H | K438H | |
| T434H | Q432H | Y442H | K438H | |
| Y442H | V440H | I462H | I439H | |
| Y442H | S431H | I462H | I439H | |
| Y442H | Q432H | I462H | I439H | |
| Y442H | T434H | I462H | I439H | |
| S431H | V440H | D435H | I439H | |
| Q432H | V440H | D435H | I439H | |
| Q432H | S431H | D435H | I439H | |
| T434H | V440H | D435H | I439H | |
| T434H | S431H | D435H | I439H | |
| T434H | Q432H | D435H | I439H | |
| Y442H | V440H | D435H | I439H | |
| Y442H | S431H | D435H | I439H | |
| Y442H | Q432H | D435H | I439H | |
| Y442H | T434H | D435H | I439H | |
| S431H | V440H | D436H | I439H | |
| Q432H | V440H | D436H | I439H | |
| Q432H | S431H | D436H | I439H | |
| T434H | V440H | D436H | I439H | |
| T434H | S431H | D436H | I439H | |
| T434H | Q432H | D436H | I439H | |
| S431H | V440H | I462H | K438H | |
| Q432H | V440H | I462H | K438H | |
| Q432H | S431H | I462H | K438H | |
| T434H | V440H | I462H | K438H | |
| T434H | S431H | I462H | K438H | |
| T434H | Q432H | I462H | K438H | |
| Y442H | V440H | D436H | I439H | |
| Y442H | S431H | D436H | I439H | |
| Y442H | Q432H | D436H | I439H | |
| Y442H | T434H | D436H | I439H | |
| Y442H | V440H | I462H | K438H | |
| Y442H | S431H | I462H | K438H | |
| Y442H | Q432H | I462H | K438H | |
| Y442H | T434H | I462H | K438H | |
| S431H | V440H | D435H | K438H | |
| Q432H | V440H | D435H | K438H | |
| Q432H | S431H | D435H | K438H | |
| T434H | V440H | D435H | K438H | |
| T434H | S431H | D435H | K438H | |
| T434H | Q432H | D435H | K438H | |
| I462H | V440H | D435H | I439H | |
| I462H | S431H | D435H | I439H | |
| Y442H | V440H | D435H | K438H | |
| I462H | Q432H | D435H | I439H | |
| Y442H | S431H | D435H | K438H | |
| I462H | T434H | D435H | I439H | |
| Y442H | Q432H | D435H | K438H | |
| Y442H | T434H | D435H | K438H | |
| I462H | Y442H | D435H | I439H | |
| S431H | V440H | D436H | K438H | |
| Q432H | V440H | D436H | K438H | |
| Q432H | S431H | D436H | K438H | |
| T434H | V440H | D436H | K438H | |
| T434H | S431H | D436H | K438H | |
| T434H | Q432H | D436H | K438H | |
| I462H | V440H | D436H | I439H | |
| I462H | S431H | D436H | I439H | |
| Y442H | V440H | D436H | K438H | |
| I462H | Q432H | D436H | I439H | |
| Y442H | S431H | D436H | K438H | |
| I462H | T434H | D436H | I439H | |
| Y442H | Q432H | D436H | K438H | |
| Y442H | T434H | D436H | K438H | |
| I462H | Y442H | D436H | I439H | |
| D435H | V440H | D436H | I439H | |
| D435H | S431H | D436H | I439H | |
| D435H | Q432H | D436H | I439H | |
| D435H | T434H | D436H | I439H | |
| I462H | V440H | D435H | K438H | |
| I462H | S431H | D435H | K438H | |
| I462H | Q432H | D435H | K438H | |
| I462H | T434H | D435H | K438H | |
| D43SH | Y442H | D436H | I439H | |
| I462H | Y442H | D435H | K438H | |
| I462H | V440H | D436H | K438H | |
| I462H | S431H | D436H | K438H | |
| I462H | Q432H | D436H | K438H | |
| I462H | T434H | D436H | K438H | |
| I462H | Y442H | D436H | K438H | |
| D43SH | V440H | D436H | K438H | |
| D435H | S431H | D436H | K438H | |
| D435H | Q432H | D436H | K438H | |
| D43SH | T434H | D436H | K438H | |
| D435H | I462H | D436H | I439H | |
| D435H | Y442H | D436H | K438H | |
| D435H | I462H | D436H | K438H | |
| S431H | V440H | I439H | K438H | |
| Q432H | V440H | I439H | K438H | |
| Q432H | S431H | I439H | K438H | |
| T434H | V440H | I439H | K438H | |
| T434H | S431H | I439H | K438H | |
| T434H | Q432H | I439H | K438H | |
| Y442H | V440H | I439H | K438H | |
| Y442H | S431H | I439H | K438H | |
| Y442H | Q432H | I439H | K438H | |
| Y442H | T434H | I439H | K438H | |
| I462H | V440H | I439H | K438H | |
| I462H | S431H | I439H | K438H | |
| I462H | Q432H | I439H | K438H | |
| I462H | T434H | I439H | K438H | |
| I462H | Y442H | I439H | K438H | |
| D435H | V440H | I439H | K438H | |
| D43SH | S431H | I439H | K438H | |
| D435H | Q432H | I439H | K438H | |
| D435H | T434H | I439H | K438H | |
| D43SH | Y442H | I439H | K438H | |
| D436H | V440H | I439H | K438H | |
| D436H | S431H | I439H | K438H | |
| D436H | Q432H | I439H | K438H | |
| D436H | T434H | I439H | K438H | |
| D436H | Y442H | I439H | K438H | |
| D435H | I462H | I439H | K438H | |
| D436H | I462H | I439H | K438H | |
| D436H | D43SH | I439H | K438H | |
| S431H | V440H | Q432H | T434H | Y442H |
| S431H | V440H | Q432H | T434H | I462H |
| S431H | V440H | Q432H | Y442H | I462H |
| S431H | V440H | T434H | Y442H | I462H |
| Q432H | V440H | T434H | Y442H | I462H |
| Q432H | S431H | T434H | Y442H | I462H |
| S431H | V440H | Q432H | T434H | D435H |
| S431H | V440H | Q432H | Y442H | D435H |
| S431H | V440H | T434H | Y442H | D435H |
| Q432H | V440H | T434H | Y442H | D435H |
| Q432H | S431H | T434H | Y442H | D435H |
| S431H | V440H | Q432H | T434H | D436H |
| S431H | V440H | Q432H | Y442H | D436H |
| S431H | V440H | T434H | Y442H | D436H |
| Q432H | V440H | T434H | Y442H | D436H |
| Q432H | S431H | T434H | Y442H | D436H |
| S431H | V440H | Q432H | I462H | D43SH |
| S431H | V440H | T434H | I462H | D435H |
| Q432H | V440H | T434H | I462H | D435H |
| Q432H | S431H | T434H | I462H | D435H |
| S431H | V440H | Y442H | I462H | D435H |
| Q432H | V440H | Y442H | I462H | D435H |
| Q432H | S431H | Y442H | I462H | D43SH |
| T434H | V440H | Y442H | I462H | D435H |
| T434H | S431H | Y442H | I462H | D435H |
| T434H | Q432H | Y442H | I462H | D43SH |
| S431H | V440H | Q432H | I462H | D436H |
| S431H | V440H | T434H | I462H | D436H |
| Q432H | V440H | T434H | I462H | D436H |
| Q432H | S431H | T434H | I462H | D436H |
| S431H | V440H | Y442H | I462H | D436H |
| Q432H | V440H | Y442H | I462H | D436H |
| Q432H | S431H | Y442H | I462H | D436H |
| T434H | V440H | Y442H | I462H | D436H |
| T434H | S431H | Y442H | I462H | D436H |
| T434H | Q432H | Y442H | I462H | D436H |
| S431H | V440H | Q432H | D435H | D436H |
| S431H | V440H | T434H | D435H | D436H |
| Q432H | V440H | T434H | D435H | D436H |
| Q432H | S431H | T434H | D435H | D436H |
| S431H | V440H | Y442H | D435H | D436H |
| Q432H | V440H | Y442H | D435H | D436H |
| Q432H | S431H | Y442H | D435H | D436H |
| T434H | V440H | Y442H | D435H | D436H |
| T434H | S431H | Y442H | D435H | D436H |
| T434H | Q432H | Y442H | D435H | D436H |
| S431H | V440H | I462H | D435H | D436H |
| Q432H | V440H | I462H | D435H | D436H |
| Q432H | S431H | I462H | D435H | D436H |
| T434H | V440H | I462H | D435H | D436H |
| T434H | S431H | I462H | D435H | D436H |
| T434H | Q432H | I462H | D435H | D436H |
| Y442H | V440H | I462H | D435H | D436H |
| Y442H | S431H | I462H | D435H | D436H |
| Y442H | Q432H | I462H | D43SH | D436H |
| Y442H | T434H | I462H | D435H | D436H |
| S431H | V440H | Q432H | T434H | I439H |
| S431H | V440H | Q432H | Y442H | I439H |
| S431H | V440H | T434H | Y442H | I439H |
| Q432H | V440H | T434H | Y442H | I439H |
| Q432H | S431H | T434H | Y442H | I439H |
| S431H | V440H | Q432H | T434H | K438H |
| S431H | V440H | Q432H | I462H | I439H |
| S431H | V440H | T434H | I462H | I439H |
| S431H | V440H | Q432H | Y442H | K438H |
| Q432H | V440H | T434H | I462H | I439H |
| S431H | V440H | T434H | Y442H | K438H |
| Q432H | S431H | T434H | I462H | I439H |
| Q432H | V440H | T434H | Y442H | K438H |
| Q432H | S431H | T434H | Y442H | K438H |
| S431H | V440H | Y442H | I462H | I439H |
| Q432H | V440H | Y442H | I462H | I439H |
| Q432H | S431H | Y442H | I462H | I439H |
| T434H | V440H | Y442H | I462H | I439H |
| T434H | S431H | Y442H | I462H | I439H |
| T434H | Q432H | Y442H | I462H | I439H |
| S431H | V440H | Q432H | D435H | I439H |
| S431H | V440H | T434H | D435H | I439H |
| Q432H | V440H | T434H | D435H | I439H |
| Q432H | S431H | T434H | D435H | I439H |
| S431H | V440H | Y442H | D435H | I439H |
| Q432H | V440H | Y442H | D435H | I439H |
| Q432H | S431H | Y442H | D435H | I439H |
| T434H | V440H | Y442H | D43SH | I439H |
| T434H | S431H | Y442H | D435H | I439H |
| T434H | Q432H | Y442H | D435H | I439H |
| S431H | V440H | Q432H | D436H | I439H |
| S431H | V440H | T434H | D436H | I439H |
| Q432H | V440H | T434H | D436H | I439H |
| Q432H | S431H | T434H | D436H | I439H |
| S431H | V440H | Q432H | I462H | K438H |
| S431H | V440H | T434H | I462H | K438H |
| Q432H | V440H | T434H | I462H | K438H |
| Q432H | S431H | T434H | I462H | K438H |
| S431H | V440H | Y442H | D436H | I439H |
| Q432H | V440H | Y442H | D436H | I439H |
| Q432H | S431H | Y442H | D436H | I439H |
| T434H | V440H | Y442H | D436H | I439H |
| T434H | S431H | Y442H | D436H | I439H |
| T434H | Q432H | Y442H | D436H | I439H |
| S431H | V440H | Y442H | I462H | K438H |
| Q432H | V440H | Y442H | I462H | K438H |
| Q432H | S431H | Y442H | I462H | K438H |
| T434H | V440H | Y442H | I462H | K438H |
| T434H | S431H | Y442H | I462H | K438H |
| T434H | Q432H | Y442H | I462H | K438H |
| S431H | V440H | Q432H | D43SH | K438H |
| S431H | V440H | T434H | D435H | K438H |
| Q432H | V440H | T434H | D435H | K438H |
| Q432H | S431H | T434H | D435H | K438H |
| S431H | V440H | I462H | D435H | I439H |
| Q432H | V440H | I462H | D435H | I439H |
| S431H | V440H | Y442H | D435H | K438H |
| Q432H | S431H | I462H | D435H | I439H |
| T434H | V440H | I462H | D435H | I439H |
| Q432H | V440H | Y442H | D435H | K438H |
| T434H | S431H | I462H | D435H | I439H |
| Q432H | S431H | Y442H | D435H | K438H |
| T434H | V440H | Y442H | D435H | K438H |
| T434H | Q432H | I462H | D435H | I439H |
| T434H | S431H | Y442H | D435H | K438H |
| T434H | Q432H | Y442H | D435H | K438H |
| Y442H | V440H | I462H | D435H | I439H |
| Y442H | S431H | I462H | D43SH | I439H |
| Y442H | Q432H | I462H | D435H | I439H |
| Y442H | T434H | I462H | D435H | I439H |
| S431H | V440H | Q432H | D436H | K438H |
| S431H | V440H | T434H | D436H | K438H |
| Q432H | V440H | T434H | D436H | K438H |
| Q432H | S431H | T434H | D436H | K438H |
| S431H | V440H | I462H | D436H | I439H |
| Q432H | V440H | I462H | D436H | I439H |
| S431H | V440H | Y442H | D436H | K438H |
| Q432H | S431H | I462H | D436H | I439H |
| T434H | V440H | I462H | D436H | I439H |
| Q432H | V440H | Y442H | D436H | K438H |
| T434H | S431H | I462H | D436H | I439H |
| Q432H | S431H | Y442H | D436H | K438H |
| T434H | V440H | Y442H | D436H | K438H |
| T434H | Q432H | I462H | D436H | I439H |
| T434H | S431H | Y442H | D436H | K438H |
| T434H | Q432H | Y442H | D436H | K438H |
| Y442H | V440H | I462H | D436H | I439H |
| Y442H | S431H | I462H | D436H | I439H |
| Y442H | Q432H | I462H | D436H | I439H |
| Y442H | T434H | I462H | D436H | I439H |
| S431H | V440H | D435H | D436H | I439H |
| Q432H | V440H | D435H | D436H | I439H |
| Q432H | S431H | D435H | D436H | I439H |
| T434H | V440H | D435H | D436H | I439H |
| T434H | S431H | D435H | D436H | I439H |
| T434H | Q432H | D435H | D436H | I439H |
| S431H | V440H | I462H | D43SH | K438H |
| Q432H | V440H | I462H | D435H | K438H |
| Q432H | S431H | I462H | D435H | K438H |
| T434H | V440H | I462H | D435H | K438H |
| T434H | S431H | I462H | D435H | K438H |
| T434H | Q432H | I462H | D435H | K438H |
| Y442H | V440H | D435H | D436H | I439H |
| Y442H | S431H | D435H | D436H | I439H |
| Y442H | Q432H | D435H | D436H | I439H |
| Y442H | T434H | D435H | D436H | I439H |
| Y442H | V440H | I462H | D435H | K438H |
| Y442H | S431H | I462H | D435H | K438H |
| Y442H | Q432H | I462H | D435H | K438H |
| Y442H | T434H | I462H | D435H | K438H |
| S431H | V440H | I462H | D436H | K438H |
| Q432H | V440H | I462H | D436H | K438H |
| Q432H | S431H | I462H | D436H | K438H |
| T434H | V440H | I462H | D436H | K438H |
| T434H | S431H | I462H | D436H | K438H |
| T434H | Q432H | I462H | D436H | K438H |
| Y442H | V440H | I462H | D436H | K438H |
| Y442H | S431H | I462H | D436H | K438H |
| Y442H | Q432H | I462H | D436H | K438H |
| Y442H | T434H | I462H | D436H | K438H |
| S431H | V440H | D435H | D436H | K438H |
| Q432H | V440H | D435H | D436H | K438H |
| Q432H | S431H | D435H | D436H | K438H |
| T434H | V440H | D435H | D436H | K438H |
| T434H | S431H | D435H | D436H | K438H |
| T434H | Q432H | D435H | D436H | K438H |
| I462H | V440H | D435H | D436H | I439H |
| I462H | S431H | D435H | D436H | I439H |
| Y442H | V440H | D435H | D436H | K438H |
| I462H | Q432H | D435H | D436H | I439H |
| Y442H | S431H | D435H | D436H | K438H |
| I462H | T434H | D435H | D436H | I439H |
| Y442H | Q432H | D435H | D436H | K438H |
| Y442H | T434H | D435H | D436H | K438H |
| I462H | Y442H | D435H | D436H | I439H |
| I462H | V440H | D435H | D436H | K438H |
| I462H | S431H | D435H | D436H | K438H |
| I462H | Q432H | D435H | D436H | K438H |
| I462H | T434H | D435H | D436H | K438H |
| I462H | Y442H | D435H | D436H | K438H |
| S431H | V440H | Q432H | I439H | K438H |
| S431H | V440H | T434H | I439H | K438H |
| Q432H | V440H | T434H | I439H | K438H |
| Q432H | S431H | T434H | I439H | K438H |
| S431H | V440H | Y442H | I439H | K438H |
| Q432H | V440H | Y442H | I439H | K438H |
| Q432H | S431H | Y442H | I439H | K438H |
| T434H | V440H | Y442H | I439H | K438H |
| T434H | S431H | Y442H | I439H | K438H |
| T434H | Q432H | Y442H | I439H | K438H |
| S431H | V440H | I462H | I439H | K438H |
| Q432H | V440H | I462H | I439H | K438H |
| Q432H | S431H | I462H | I439H | K438H |
| T434H | V440H | I462H | I439H | K438H |
| T434H | S431H | I462H | I439H | K438H |
| T434H | Q432H | I462H | I439H | K438H |
| Y442H | V440H | I462H | I439H | K438H |
| Y442H | S431H | I462H | I439H | K438H |
| Y442H | Q432H | I462H | I439H | K438H |
| Y442H | T434H | I462H | I439H | K438H |
| S431H | V440H | D435H | I439H | K438H |
| Q432H | V440H | D435H | I439H | K438H |
| Q432H | S431H | D435H | I439H | K438H |
| T434H | V440H | D435H | I439H | K438H |
| T434H | S431H | D435H | I439H | K438H |
| T434H | Q432H | D435H | I439H | K438H |
| Y442H | V440H | D435H | I439H | K438H |
| Y442H | S431H | D435H | I439H | K438H |
| Y442H | Q432H | D435H | I439H | K438H |
| Y442H | T434H | D435H | I439H | K438H |
| S431H | V440H | D436H | I439H | K438H |
| Q432H | V440H | D436H | I439H | K438H |
| Q432H | S431H | D436H | I439H | K438H |
| T434H | V440H | D436H | I439H | K438H |
| T434H | S431H | D436H | I439H | K438H |
| T434H | Q432H | D436H | I439H | K438H |
| Y442H | V440H | D436H | I439H | K438H |
| Y442H | S431H | D436H | I439H | K438H |
| Y442H | Q432H | D436H | I439H | K438H |
| Y442H | T434H | D436H | I439H | K438H |
| I462H | V440H | D435H | I439H | K438H |
| I462H | S431H | D435H | I439H | K438H |
| T462H | Q432H | D435H | I439H | K438H |
| I462H | T434H | D435H | I439H | K438H |
| I462H | Y442H | D435H | I439H | K438H |
| I462H | V440H | D436H | I439H | K438H |
| I462H | S431H | D436H | I439H | K438H |
| I462H | Q432H | D436H | I439H | K438H |
| I462H | T434H | D436H | I439H | K438H |
| I462H | Y442H | D436H | I439H | K438H |
| D435H | V440H | D436H | I439H | K438H |
| D435H | S431H | D436H | I439H | K438H |
| D435H | Q432H | D436H | I439H | K438H |
| D435H | T434H | D436H | I439H | K438H |
| D435H | Y442H | D436H | I439H | K438H |
| D435H | I462H | D436H | I439H | K438H |

[0095] In some embodiments, the AAV-binding polypeptide comprises SEQ ID NO: 29 with at least one, at least two, at least three, at least four, or at least five mutations, wherein each mutation is individually selected from the group consisting of S23H, Q24H, T26H, D29H, K30H, I31H, V32H, Y34H, and 154H. In some embodiments, the AAV-binding polypeptide comprises SEQ ID NO: 29 with V32H and V34H mutations. In some embodiments, the AAV-binding polypeptide comprises SEQ ID NO: 29 with S23H and Q24H mutations. In some embodiments, the AAV-binding polypeptide comprises SEQ ID NO: 29 with at least one, at least two, at least three, at least four, or at least five mutations, wherein each mutation is individually selected from the group consisting of S23H, Q24H, T26H, D29H, K30H, I31H, V32H, Y34H, and I54H. In some embodiments, the AAV-binding polypeptide comprises an amino acid sequence of any one of SEQ ID NO: 76-86.

[0096] In some embodiments, the AAV-binding polypeptide comprises SEQ ID NO: 29 with an additional five amino acids at the N-terminus having an amino acid sequence of GNRPP (SEQ ID NO: 89), and an additional five amino acids at the C-terminus having an amino acid sequence of VDYPG (SEQ ID NO: 90). In some embodiments, the AAV-binding polypeptide comprises an amino acid sequence of SEQ ID NO: 52. In some embodiments, the AAV-binding polypeptide comprises SEQ ID NO: 29 with at least one, at least two, at least three, at least four, or at least five mutations, wherein each mutation is individually selected from the group consisting of S23H, Q24H, T26H, D29H, K30H, I31H, V32H, Y34H, and I54H and an additional five amino acids at the N-terminus having an amino acid sequence of GNRPP (SEQ ID NO: 89), and an additional five amino acids at the C-terminus having an amino acid sequence of VDYPG (SEQ ID NO: 90). Tn some embodiments, the AAV-binding polypeptide comprises SEQ ID NO: 52 with at least one, at least two, at least three, at least four, or at least five mutations, wherein each mutation is individually selected from the group consisting of S23H, Q24H, T26H, D29H, K30H, I31H, V32H, Y34H, and I54H.

[0097] In some embodiments, the AAV-binding polypeptide is encoded by a nucleic acid sequence of any one of SEQ ID NO: 93-116. In some embodiments, the AAV-binding polypeptide comprises SEQ ID NO: 29 with V32H and V34H mutations and an additional five amino acids at the N-terminus having an amino acid sequence of GNRPP (SEQ ID NO: 89), and an additional five amino acids at the C-terminus having an amino acid sequence of VDYPG (SEQ ID NO: 90). In some embodiments, the AAV-binding polypeptide comprises SEQ ID NO: 29 with S23H and Q24H mutations and an additional five amino acids at the N-terminus having an amino acid sequence of GNRPP (SEQ ID NO: 89), and an additional five amino acids at the C-terminus having an amino acid sequence of VDYPG (SEQ ID NO: 90). In some embodiments, the AAV-binding polypeptide comprising SEQ ID NO: 29 with at least one, at least two, at least three, at least four, or at least five mutations, wherein each mutation is individually selected from the group consisting of S23H, Q24H, T26H, D29H, K30H, I31H, V32H, Y34H, and 154H and an additional five amino acids at the N-terminus having an amino acid sequence of GNRPP (SEQ ID NO: 89), and an additional five amino acids at the C-terminus having an amino acid sequence of VDYPG (SEQ ID NO: 90). In some embodiments, the AAV-binding polypeptide comprises an amino acid sequence of any one of SEQ ID NOs: 53-63.

[0098] In some embodiments, the AAV-binding polypeptide comprises an amino acid sequence of SEQ ID NO; 29, plus an additional five amino acids at the N-terminus having an amino acid sequence of GNRPP (SEQ ID NO: 89), and an additional four amino acids at the C-terminus having an amino acid sequence of VDYP (SEQ ID NO: 91). In some embodiments, the AAV-binding polypeptide comprises an amino acid sequence of SEQ ID NO: 64. In some embodiments, the AAV-binding polypeptide comprises an amino acid sequence of SEQ ID NO: 29 with at least one, at least two, at least three, at least four, or at least five mutations, wherein each mutation is individually selected from the group consisting of S23H, Q24H, T26H, D29H, K30H, I31H, V32H, Y34H, and I54K and an additional five amino acids at the N-terminus having an amino acid sequence of GNRPP (SEQ ID NO: 89), and an additional four amino acids at the C-terminus having an amino acid sequence of VDYP (SEQ ID NO: 91). In some embodiments, the AAV-binding polypeptide comprises SEQ ID NO: 29 plus V32H and V34H mutations and an additional five amino acids at the N-terminus having an amino acid sequence of GNRPP (SEQ ID NO: 89), and an additional four amino acids at the C-terminus having an amino acid sequence of VDYP (SEQ ID NO: 91). In some embodiments, the AAV-binding polypeptide comprises SEQ ID NO: 29 with S23H and Q24H mutations and an additional five amino acids at the N-terminus having an amino acid sequence of GNRPP (SEQ ID NO: 89), and an additional four amino acids at the C-terminus having an amino acid sequence of VDYP (SEQ ID NO: 91). In some embodiments, the AAV-binding polypeptide comprises an amino acid sequence of SEQ ID NO: 29 with at least one, at least two, at least three, at least four, or at least five mutations, wherein each mutation is individually selected from the group consisting of S23H, Q24H, T26H, D29H, K30H, I31H, V32H, Y34H, and 154H and an additional five amino acids at the N-terminus having an amino acid sequence of GNRPP (SEQ ID NO: 89), and an additional four amino acids at the C-terminus having an amino acid sequence of VDYP (SEQ ID NO; 91). In some embodiments, the AAV-binding polypeptide comprises an amino acid sequence of any one of SEQ ID NOS: 65-75.

[0099] In some embodiments, the AAV-binding polypeptides described herein comprise one or more MANEC motifs (See, e.g., SEQ ID NOS: 49-51). In some embodiments, the AAV-binding polypeptides described herein comprise one or more recombinant MANEC motifs. In some embodiments, the AAV-binding polypeptides described herein comprise an amino acid sequence with at least about 80%, at least about 90°/%, at least about 95, or at least about 95% identity to a wild type MANEC motif. In some embodiments, the AAV-binding polypeptides comprise a MANEC motif having at least about 80%, at least about 90% or at least about 95% identity to any one of SEQ ID NOs: 49-51. In some embodiments, the AAV-binding polypeptides bind to AAV particles via one or more MANEC motifs.

[0100] In some embodiments, the AAV-binding polypeptides described herein comprise an N-terminal methionine. In some embodiments, the N-terminal methionine initiates translation of an AAV-binding polypeptide described herein. In some embodiments, the AAV-binding polypeptides described herein lack an N-terminal methionine.

[0101] In some embodiments, the AAV-binding polypeptides described herein bind to AAV particles of the following serotypes: AAV1, AAV2, AAV3, AAV4, AAV5, AAV6, AAV7, AAV8, AAV9, AAV10, AAV11, AAV12, AAVrh8, AAVrh10, and/or AAVrh74. In some embodiments, the AAV-binding polypeptides bind to AAV particles of one or more of the following serotypes: AAV1, AAV2, AAV3B, AAV5, AAV6, AAV8, and AAV9. In some embodiments, the AAV-binding polypeptides bind to AAV1 particles. In some embodiments, the AAV-binding polypeptides bind to AAV2 particles. In some embodiments, the AAV-binding polypeptides bind to AAV3B particles. In some embodiments, the AAV-binding polypeptides bind to AAV5 particles. In some embodiments, the AAV-binding polypeptides bind to AAV6 particles. In some embodiments, the AAV-binding polypeptides bind to AAV8 particles. In some embodiments, the AAV-binding polypeptides bind to AAV9 particles.

[0102] In some embodiments, the AAVR is the human AAVR. In some embodiments, the AAVR is a primate AAVR. In some embodiments, the AAVR is a wildtype AAVR. In some embodiments, the AAVR is a mutant AAVR

[0103] In some embodiments, the AAVR is a glycoprotein. In some embodiments, the AAV-binding polypeptides described herein comprise one or more glycosylation sites. In some embodiments, the AAV-binding polypeptides comprise O-linked glycosylation sites. In some embodiments, the AAV-binding polypeptides comprise N-linked glycosylation sites. In some embodiments, the AAVR comprises N-linked glycosylation. In some embodiments, the AAVR is glycosylated at one or more asparagine and/or glutamine residues.

[0104] In some embodiments, a purification matrix comprises from about 1 to about 100 AAV-binding polypeptides. In some embodiments, the number of AAV-binding polypeptides is about 1, about 5, about 10, about 20, about 30, about 40, about 50, about 55, about 60, about 65, about 70, about 75, about 80, about 85, about 90, about 95, or about 100. In some embodiments, a single polypeptide with phase behavior may be coupled to multiple AAV-binding polypeptides, such as about 1 to about 100 AAV-binding polypeptides.

[0105] In some embodiments, the AAV-binding polypeptide comprises a sequence of any one of SEQ ID NOS: 28-34, 37-41, 43-47, and 52-86. In some embodiments wherein a single polypeptide with phase behavior is coupled to multiple AAV-binding polypeptides, each AAV-binding polypeptide may be independently selected from SEQ ID NOS: 28-34, 37-41, 43-47, and 52-86.

[0106] In some embodiments, a nucleic acid encodes one or more AAV binding polypeptides described herein. In some embodiments, a vector comprises a nucleic acid that encodes one or more AAV binding polypeptides described herein.

[0107] In some embodiments, a kit comprises an AAV binding polypeptide, a nucleic acid encoding an AAV binding polypeptide, and/or a vector comprising a nucleic acid encoding an AAV binding polypeptide.

[0108] In some embodiments, a purification matrix comprises an AAV-binding polypeptide. In some embodiments, a kits comprises a purification matrix.

[0109] In some embodiments, the AAV-binding polypeptides described herein bind to one or more AAV particles. In some embodiments, purification matrices that comprise an AAV-binding polypeptide bind to one or more AAV particles.

[0110] In some embodiments, the AAV-binding polypeptides have a K_{d} from about 1 nM to about 500 nM. In some embodiments, the AAV-binding polypeptides have a K_{d} of about 1 nM, about 2 nM, about 3 nM, about 4 nM, about 5 nM, about 6 nM, about 7 nM, about 8 nM, about 9 nM, about 10 nM, about 20 nM, about 30 nM, about 40 nM, about 50 nM, about 60 nM, about 70 nM, about 80 nM, about 90 nM, about 100 nM, about 110 nM, about 120 nM, about 130 nM, about 140 nM, about 150 nM, about 160 nM, about 170 nM, about 180 nM, about 190 nM, about 200 nM, about 210 nM, about 220 nM, about 230 nM, about 240 nM, about 250 nM, about 260 nM, about 270 nM, about 280 nM, about 290 nM, about 300 nM, about 310 nM, about 320 nM, about 330 nM, about 340 nM, about 350 nM, about 360 nM, about 370 nM, about 380 nM, about 390 nM, about 400 nM, about 410 nM, about 420 nM, about 430 nM, about 440 nM, about 450 nM, about 460 nM, about 470 nM, about 480 nM, about 490 nM, or about 500 nM, including all values and ranges in between. In some embodiments, the AAV-binding polypeptides have an affinity of 50 nM or greater. In some embodiments, the AAV-binding polypeptides have an affinity of about 50 nM, about 40 nM, about 30 nM, about 20 nM, about 2 nM, about 1 nM, about 0.1 nM, about 0.01 nM, about 0.001 nM.

[0111] In some embodiments, the binding of the AAV-binding polypeptides to an AAV particle is disrupted at a pH of 2.5 or higher. In some embodiments, the binding of the AAV-binding polypeptides to an AAV particle is disrupted at a pH of about 2.5, about 3.0, about 3.5, about 4.0, about 4.5, about 5.0, about 5.5, about 6.0, about 6.5, about 7.0, about 7.5, about 8.0, about 8.5, about 9.0, about 9.5, about 10.0, about 10.5, about 11.0, about 11.5, about 12.0, about 12.5, about 13.0, or about 13.5.

### Support

[0112] In some embodiments, the disclosure provides a purification matrix comprising an AAV-binding polypeptide that is coupled to a support (e.g., a solid support). In some embodiments, the disclosure provides a purification matrix comprising an AAV-binding polypeptide and a peptide having phase behavior that is coupled to a support. In some embodiments, the support is a bead, resin, plate, chip, a membrane, a fiber, or a polymer. In some embodiments, the support comprises silica, agarose, soft agarose, cellulose, cellulose acetate, polystyrene, sepharose, heparin sepharose, celluline sulfate, hydroxyapatite, ceramic hydroxyapatite, agarose, dextran, latex, polymethacrylate, polyacrylamide, nitrocellulose, nylon, polyester, polyethersulfone, poly(styrenedivinyl)benzene, ceramic particles, polyacrylamide, polyolefin, and/or polyvinylidene fluoride, sulphopropyl immobilized on agarose, and/or combinations thereof.

[0113] In some embodiments, the support is a polymer. Non-limiting examples of polymers include polyamylic acid, polyacrlonitrile, polyallyamine, polyacrylates, polybutyl acrylate, polymethylmethacrylate, polyalkyl acrylates, polyalkyl methacrylate, polybutadiene, polycarbomethylsilane, polystyrene, polypeptides, polynucleic acids, and poly(carbonate) urethane. In some embodiments, the support is a synthetic polymer. In some embodiments, the support is a recombinant polymer.

[0114] In some embodiments, the support is a resin. In some embodiments, the resin is positively charged. In some embodiments, a cation is attached to the resin. In some embodiments, the cation is a quaternary amino group. In some embodiments, the positively charged resin comprises diethylaminoethyl cellulose, magnetic amine, magnetic propylamine, magnetic quaternary ammonium, magnetic poly-D-lysine, poly-D-lysine functionalized polyurethane, spermine latex, tris (2-aminoethyl) amine latex, tris (2-aminoethyl) amine beaded agarose, tris (2-aminoethyl)-acrylamide, and tris (2-aminoethyl)polyurethane amine. In some embodiments, the resin is negatively charged. In some embodiments, an anion is attached to the resin. In some embodiments, an anion is covalently attached to the resin. Non-limiting examples of anions include sulfonate or carboxylates.

[0115] In some embodiments, the support is porous. In some embodiments, the porous support is a resin or a bead. In some embodiments, the porous support is a magnetic bead. In some embodiments, the porous support has a pore size from about 50 nm to about 5000 nm. In some embodiments, the pore size is about 50 nm, about 100 nm, about 150 nm, about 200 nm, about 300 nm, about 400 nm, about 500 nm, about 600 nm, about 700 nm, about 800 nm, about 900 nm, about 1000 nm, about 1100 nm, about 1200 nm, about 1300 nm, about 1400 nm, about 1500 nm, about 1600 nm, about 1700 nm, about 1800 nm, about 1900 nm, about 2000 nm, about 2100 nm, about 2200 nm, about 2300 nm, about 2400 nm, about 2500 nm, about 2600 nm, about 2700 nm, about 2800 nm, about 2900 nm, about 3000 nm, about 3100 nm, about 3200 nm, about 3300 nm, about 3400 nm, about 3500 nm, about 3600 nm, about 3700 nm, about 3800 nm, about 3900 nm, about 4000 nm, about 4100 nm, about 4200 nm, about 4300 nm, about 4400 nm, about 4500 nm, about 4600 nm, about 4700 nm, about 4800 nm, about 4900 nm, or about 5000 nm. In some embodiments, the pore size is the radius of the pores. In some embodiments, the pore size is the diameter of the pores.

[0116] In some embodiments, the support comprises one or more cross-linked materials. In some embodiments, the porous support comprises one or more cross-linked materials. In some embodiments, cross-linking prevents interaction of AAV with the pores of the support. In some embodiments, the support is a static fibrous network. In some embodiments, the support is a solid-state network.

[0117] In some embodiments, the support is pretreated prior to coupling to the AAV-binding polypeptide. In some embodiments, the support is pre-treated with RNase solution.

[0118] In some embodiments, the support is coupled to the AAV-binding polypeptide via a linker. In some embodiments, the linker is coupled to the support. In some embodiments, the linker is coupled to the AAV-binding polypeptide. Examples of linkers are provided throughout this disclosure.

[0119] In some embodiments, the support is separated from solution by decantation, centrifugation or filtration. If the particles are magnetic, magnetic field separation can be used.

[0120] In some embodiments, the support is contained in a vessel. Non-limiting examples of vessels include centrifuge tubes, spin tubes, syringes, cartridges, chambers, chips, multiple-well plates, beakers, chromatography columns, or test tubes.

### Polypeptide Having Phase Behavior

[0121] In some embodiments, the disclosure provides a purification matrix comprising a polypeptide having phase behavior. In some embodiments, the disclosure provides a purification matrix comprising a polypeptide having phase behavior that is coupled to an AAV-binding protein. In some embodiments, the disclosure provides a purification matrix comprising a support that is coupled to fusion protein comprising (i) an AAV-binding protein and (ii) a polypeptide having phase behavior.

[0122] In some embodiments, the polypeptide with phase behavior is a resilin-like polypeptide (RLP). Resilin-like polypeptides are elastomeric polypeptides with mechanical properties including desirable resilience, compressive elastic modulus, tensile elastic modulus, shear modulus, extension to break, maximum tensile strength, hardness, rebound, and compression set. In some embodiments, the resilin-like polypeptides described herein are polymers which comprise one or more repeats. In some embodiments, the polymeric repeats may have an amino acid sequence selected from any one of SEQ ID NOS: 1-9.

[0123] In some embodiments, a resilin-like polypeptide comprises more than one type of repeat, e.g. a repeat of SEQ ID NO: 1 and a repeat of SEQ ID NO: 3.

[0124] In some embodiments, the resilin-like polypeptides described herein comprise repeats that occur up to 500 times within a given RLP. In some embodiments, the repeats occur about 1, about 2, about 3, about 4, about 5, about 6, about 7, about 8, about 9, about 10, about 20, about 30, about 40, about 50, about 60, about 70, about 80, about 90, about 100, about 110, about 120, about 130, about 140, about 150, about 160, about 170, about 180, about 190, about 200, about 210, about 220, about 230, about 240, about 250, about 260, about 270, about 280, about 290, about 300, about 310, about 320, about 330, about 340, about 350, about 360, about 370, about 380, about 390, about 400, about 450, or about 500 times.

[0125] In some embodiments, the RLP comprises one or more partial repeats. In some embodiments, the length of a partial repeat is 1, 2, 3, 4, 5, 6, 7, 8, 9, or 10 amino acids. In some embodiments, the RLP comprises one or more additional amino acids at the N-terminus or C-terminus of the RLP that are not part of a repeat.

[0126] In some embodiments, one or more RLP repeats are scrambled, i.e., they contain a different amino acid sequence but retain the same amino acid composition. For example, a repeat may have a different amino acid sequence than SEQ ID NO: 8, but retain the same amino acid composition.

[0127] In some embodiments, the polypeptide with phase behavior is an elastin-like polypeptide. Elastin-like polypeptides (ELPs) are biopolymers derived from tropoelastin. In some embodiments, the elastin-like polypeptides described herein are polymers comprising a pentapeptide repeat having the sequence (Val-Pro-Gly-Xaa-Gly)ₙ (SEQ ID NO: 10).

[0128] In some embodiments, n is 1, 2, 3, 4, 5, 6, 7, 8, 9, 10, 11, 12, 13, 14, 15, 16, 17, 18, 19, 20, 21, 22, 23, 24, 25, 26, 27, 28, 29, 30, 31, 32, 33, 34, 35, 36, 37, 38, 39, 40, 41, 42, 43, 44, 45, 46, 47, 48, 49, 50, 51, 52, 53, 54, 55, 56, 57, 58, 59, 60, 61, 62, 63, 64, 65, 66, 67, 68, 69, 70, 71, 72, 73, 74, 75, 76, 77, 78, 79, 80, 81, 82, 83, 84, 85, 86, 87, 88, 89, 90, 91, 92, 93, 94, 95, 96, 97, 98, 99, 100, 101, 102, 103, 104, 105, 106, 107, 108, 109, 110, 111, 112, 113, 114, 115, 116, 117, 118, 119, 120, 121, 122, 123, 124, 125, 126, 127, 128, 129, 130, 131, 132, 133, 134, 135, 136, 137, 138, 139, 140, 141, 142, 143, 144, 145, 146, 147, 148, 149, 150, 160, 170, 180, 190, 200, 210, 220, 230, 240, 250, 260, 270, 280, 290, 300, 310, 320, 330, 340, 350, 360, 370, 380, 390, 400, 410, 420, 430, 440, 450, 460, 470, 480, 490, or 500, including all values and ranges in between.

[0129] In some embodiments, the pentapeptide repeat is scrambled, for example it comprises a different amino acid sequence but maintains the same amino acid composition. For example, an ELP may comprise a different amino acid sequence than SEQ ID NO: 10, but maintains the same amino acid composition, e.g. 40% of the sequence is glycine, 20% of the sequence is Xaa (e.g., any amino acid except proline), 20% of the sequence is proline, and 20% of the sequence is valine.

[0130] In some embodiments, the ELP comprises one or more partial repeats. In some embodiments, the length of a partial repeat is 1, 2, 3, or 4 amino acids. In some embodiments, the ELP comprises one or more additional amino acids at the N-terminus or C-terminus of the ELP that are not part of a repeat.

[0131] ELPs and RLPs undergo a phase transition in response to an environmental factor. ELPs and RLPs retain their ability to undergo a phase transition when coupled to one or more polypeptides (such as one or more AAV binding polypeptides), or expressed as a fusion protein with one or more other polypeptides (such as one or more AAV binding polypeptides). Polymers like ELPs and RLPs exhibit a transition temperature (Tₜ), also referred to as a cloud point temperature (Tc). In some embodiments ELPs and RLPs undergo a reversible phase transition from a soluble to an insoluble phase at the Tₜ. ELPs that transition from a soluble to an insoluble phase with heating or an increase in salt concentration have a Tₜ referred to as a lower critical solution temperature (LCST). RLPs that transition from a soluble to an insoluble phase with cooling or a decrease in salt concentration have a Tₜ referred to as a lower critical solution temperature (UCST). In some embodiments, the phase transition results from a change in secondary structure of the ELP and/or RLP. For example, the phase transition of an ELP results from a change in secondary structure from a random coil (below the Tₜ) to a type H f-turn. In some embodiments, the change in secondary structure is characterized by a method selected from circular dichroism spectropolarimetry, small angle x-ray scattering, ultraviolet-visible spectrophotometry, static light scattering, dynamic light scattering, nuclear magnetic resonance spectroscopy, solid-state nuclear magnetic resonance spectroscopy, infrared spectroscopy, Fourier transform infrared spectroscopy (FTIR), small angle neutron scattering, microscopy, and cryo-electron microscopy. In some embodiments, the phase transition of an ELP does not result from a change in secondary structure.

[0132] In some embodiments, the RLPs and ELPs described herein have a transition temperature between about 0° C. and about 100° C. In some embodiments, the RLPs and ELPs described herein have a transition temperature between about 10° C. and about 50° C. In some embodiments the transition temperature is about 0° C., about 1° C., about 2° C., about 3° C., about 4° C., about 5° C., about 6° C., about 7° C., about 8° C., about 9° C., about 10° C., about 11° C., about 12° C., about 13° C., about 14° C., about 15° C., about 16° C., about 17° C., about 18° C., about 19° C., about 20° C., about 21° C., about 22° C., about 23° C., about 24° C., about 25° C., about 26° C., about 27° C., about 28° C., about 29° C., about 30° C., about 31° C., about 32° C., about 33° C., about 34° C., about 35° C., about 36° C., about 37° C., about 38° C., about 39° C., about 40° C., about 41° C., about 42° C., about 43° C., about 44° C., about 45° C., about 46° C., about 47° C., about 48° C., about 49° C., about 50° C., about 51° C., about 52° C., about 53° C., about 54° C., about 55° C., about 56° C., about 57° C., about 58° C., about 59° C., about 60° C., about 61° C., about 62° C., about 63° C., about 64° C., about 65° C., about 66° C., about 67° C., about 68° C., about 69° C., about 70° C., about 71° C., about 72° C., about 73° C., about 74° C., about 75° C., about 76° C., about 77° C., about 78° C., about 79° C., about 80° C., about 81° C., about 82° C., about 83° C., about 84° C., about 85° C., about 86° C., about 87° C., about 88° C., about 89° C., about 90° C., about 91° C., about 92° C., about 93° C., about 94° C., about 95° C., about 96° C., about 97° C., about 98° C., about 99° C., or about 100° C. In some embodiments, the RLPs described herein have a transition temperature from about 10° C. to about 100° C.

[0133] In some embodiments, the Tₜ of the RLPs and ELPs described herein is modulated by manipulating the primary structure (e.g. amino acid sequence) of the RLP and ELP. In some embodiments, the hydrophobicity of the ELP or RLP is modulated. In some embodiments, the hydrophobicity of the ELP is modified by altering the identity of the guest residue Xaa. In some embodiments, the hydrophobicity of the ELP or RLP is increased resulting in a decreased Tₜ. In some embodiments, the hydrophobicity of the ELP or RLP is decreased resulting in an increased Tₜ. In some embodiments, the polarity of the ELP or RLP is modulated. In some embodiments, the polarity of the ELP is modulated by altering the identity of the guest residue Xaa. In some embodiments, the polarity of the ELP or RLP is increased resulting in an increased Tₜ. In some embodiments, the polarity of the ELP or RLP is decreased resulting in a decreased Tₜ.

[0134] In some embodiments, the number of ELP pentapeptide repeats (n) is modulated to alter the Tₜ. In some embodiments, n of the pentapeptide repeat (Val-Pro-Gly-Xaa-Gly)ₙ (SEQ ID NO: 10) is an integer from 1 to 500, inclusive of endpoints. In some embodiments, n is 1, 2, 3, 4, 5, 6, 7, 8, 9, 10, 11, 12, 13, 14, 15, 16, 17, 18, 19, 20, 21, 22, 23, 24, 25, 26, 27, 28, 29, 30, 31, 32, 33, 34, 35, 36, 37, 38, 39, 40, 41, 42, 43, 44, 45, 46, 47, 48, 49, 50, 51, 52, 53, 54, 55, 56, 57, 58, 59, 60, 61, 62, 63, 64, 65, 66, 67, 68, 69, 70, 71, 72, 73, 74, 75, 76, 77, 78, 79, 80, 81, 82, 83, 84, 85, 86, 87, 88, 89, 90, 91, 92, 93, 94, 95, 96, 97, 98, 99, 100, 101, 102, 103, 104, 105, 106, 107, 108, 109, 110, 111, 112, 113, 114, 115, 116, 117, 118, 119, 120, 121, 122, 123, 124, 125, 126, 127, 128, 129, 130, 131, 132, 133, 134, 135, 136, 137, 138, 139, 140, 141, 142, 143, 144, 145, 146, 147, 148, 149, 150, 160, 170, 180, 190, 200, 210, 220, 230, 240, 250, 260, 270, 280, 290, 300, 310, 320, 330, 340, 350, 360, 370, 380, 390, 400, 410, 420, 430, 440, 450, 460, 470, 480, 490, or 500, including all values and ranges in between.

[0135] In some embodiments, Xaa is a “guest residue,” i.e., any amino acid that does not eliminate the phase behavior of the ELP. In some embodiments, Xaa is any amino acid except proline. In some embodiments, Xaa is independently selected for each repeat. For example, a given ELP may comprise the guest residues alanine, glycine, and valine at a ratio of 8:7:1. In some embodiments Xaa is selected from the group consisting of alanine, arginine, asparagine, aspartic acid, cysteine, glutamic acid, glutamine, glycine, histidine, isoleucine, leucine, lysine, methionine, phenylalanine, praline, serine, threonine, tryptophan, tyrosine and valine. In some embodiments, Xaa is a non-classical amino acid selected from Table 2 and/or the group consisting of 2,4-diaminobutyric acid, α-amino-isobutyric acid, alloisoleucine, 4-aminobutyric acid, 2-amino butyric acid (Abu), ε-Ahx, 6-amino hexanoic acid, 2-amino isobutyric acid (Aib), 3-amino propionic acid, ornithine, norleucine, norvaline, hydroxyproline, sarcosine, citrulline, homocitrulline, cysteic acid, t-butylglycine, t-butylalanine, phenylglycine, cyclohexylalanine, β-alanine, fluoro-amino acids, designer amino acids such as β-methyl amino acids, Cα-methyl amino acids, Na-methyl amino acids, and amino acid analogs in general. In some embodiments, Xaa is the D-isomer of a natural or non-classical amino acid.

[0136] In some embodiments, the Tₜ of the RLPs and ELPs described herein is modulated by introducing one or more environmental factors to the composition comprising the RLP and/or ELP. In some embodiments, the Tₜ of the ELPs and/or RLPs is modulated by adjusting the ionic strength of solvents. In some embodiments, the ionic strength of the solvent is adjusted by adding salt. In some embodiments, ELPs and/or RLPs comprise lower Tₜ in solvents comprising anions categorized as kosmotropes. Anions that are kosmotropes are highly hydrated and influence the water shield on ELPs and/or RLPs. In some embodiments, the Tₜ of ELPs and/or RLPs can be adjusted through the addition of anions that are chaotropes. At low concentrations, the addition of chaotropes increase the Tₜ of the ELP and/or RLP. At high concentrations, the addition of a chaotrope decreases the Tₜ of the ELP and/or RLP. In some embodiments, the Tₜ of the ELP and/or RLP can be tuned by introducing one or more reagents that disrupts hydrogen bonds. Non-limiting examples of reagents that disrupt hydrogen bonds include sodium dodecyl sulfate (SDS) and urea. In some embodiments, reagents that enhance hydrogen bond formation are utilized to modulate the Tₜ. In some embodiments, reagents that enhance hydrophobic interactions are utilized to modulate the Tₜ. Trifluoroethanol is a reagent which enhances both hydrophobic interactions and hydrogen bond formation, causing a decrease in Tₜ.

[0137] In some embodiments, the ELP and/or RLP concentration can be adjusted to modulate Tₜ. In some embodiments, a higher ELP and/or RLP concentration results in a reduced Tₜ. In some embodiments, a lower ELP and/or RLP concentration results in an increased Tₜ.

[0138] In addition, modulation of pH, light, and ion concentrations also can be utilized to modulate Tₜ.

[0139] In some embodiments, modulation of the number of (e.g. addition or removal) charged amino acids (e.g. histidine, lysine, arginine, glutamic acid, aspartic acid, ornithine, or other non-natural charged amino acids) and identity (e.g. positively or negatively charged) enables tuning of the Tₜ through pH modulation.

[0140] In some embodiments, the ELPs and/or RLPs described herein are block copolymers. A block copolymer comprises two or more sequence domains or blocks, in which two or more blocks comprise different properties. Non-limiting examples of properties that can be tuned include hydrophilicity, hydrophobicity, polarity, and secondary structure. In some embodiments, the block copolymer is an amphiphile, e.g. it comprises at least one hydrophobic and at least one hydrophilic block.

[0141] In some embodiments, the ELPs and/or RLPs described herein assemble into various morphologies. Non-limiting examples of morphologies include a spherical aggregate, a micelle, a vesicle, a fibril, a nanofibril, a nanotube, and a hydrogel. In some embodiments, the RLPs and/or ELPs described herein assemble into various morphologies after the addition of an environmental factor. In some embodiments, the RLPs and/or ELPs described herein change from one morphology to another morphology after the addition of an environmental factor. In some embodiments, the RLPs and/or ELPs described herein change from one morphology to another morphology after the addition of an AAV particle.

[0142] In some embodiments, addition of an environmental factor causes an RLP and/or ELP to undergo a phase transition. In some embodiments, at the RLP and/or ELP phase transition, the RLP and/or ELP converts from one morphology to another morphology.

[0143] In some embodiments, a phase transition of an RLP and/or ELP causes the formation of dense, liquid, droplets.

[0144] In some embodiments, the polypeptide with phase behavior comprises an amino acid sequence selected from the group consisting of:

(a)
(SEQ ID NO: 1)
(GRGDSPY)ₙ
(b)
(SEQ ID NO: 2)
(GRGDSPH)ₙ
(c)
(SEQ ID NO: 3)
(GRGDSPV)ₙ
(d)
(SEQ ID NO: 4)
(GRGDSPYG)ₙ
(e)
(SEQ ID NO: 5)
(RPLGYDS)ₙ
(f)
(SEQ ID NO: 6)
(RPAGYDS)ₙ
(g)
(SEQ ID NO: 7)
(GRGDSYP)ₙ
(h)
(SEQ ID NO: 8)
(GRGDSPYQ)ₙ
(i)
(SEQ ID NO: 9)
(GRGNSPYG)ₙ
(j)
(SEQ ID NO: 11)
(GVGVP)ₙ;
(k)
(SEQ ID NO: 12)
(GVGVPGLGVPGVGVPGLGVPGVGVP)ₘ;
(l)
(SEQ ID NO: 13)
(GVGVPGVGVPGAGVPGVGVPGVGVP)ₘ;
(m)
(SEQ ID NO: 14)
(GVGVPGWGVPGVGVPGWGVPGVGVP)ₘ;
(n)
(SEQ ID NO: 15)
(GVGVPGVGVPGVGVPGVGVPGVGVPGVGVPGEGVPGFGVPGVGVP)ₘ;
(o)
(SEQ ID NO: 16)
(GVGVPGVGVPGVGVPGVGVPGVGVPGVGVPGKGVPGFGVPGVGVP)ₘ;
and
(p)
(SEQ ID NO: 17)
(GAGVPGVGVPGAGVPGVGVPGAGVP)ₘ;

[0145] or a randomized, scrambled analog thereof;
[0146] wherein:
[0147] n is an integer in the range of 1-500, inclusive of endpoints; and
[0148] m is an integer in the range of 4-25, inclusive of endpoints.

[0149] In some embodiments, the polypeptide with phase behavior is (GVGVPGLGVPGVGVPGLGVPGVGVP)ₘ (SEQ ID NO: 12), wherein m is 16. In some embodiments, the polypeptide with phase behavior comprises an amino acid sequence of (GVGVPGLGVPGVGVPGLGVPGVGVP)ₘ (SEQ ID NO: 12), wherein m is 16, and up to 10 additional amino acids at the N-terminus or C-terminus. In some embodiments, the polypeptide with phase behavior comprises an amino acid sequence of (GVGVPGLGVPGVGVPGLGVPGVGVP)ₘ (SEQ ID NO: 12), wherein m is 16, and an additional C-terminal glycine. In some embodiments, the polypeptide with phase behavior comprises an amino acid sequence of (GVGVPGLGVPGVGVPGLGVPGVGVP)ₘ (SEQ ID NO: 12), wherein m is 16, and an additional N-terminal methionine. In some embodiments, the polypeptide with phase behavior comprises an amino acid sequence of (GVGVPGLGVPGVGVPGLGVPGVGVP)ₘ (SEQ ID NO: 12), wherein m is 16, and an additional C-terminal glycine and an additional N-terminal methionine.

[0150] In some embodiments, the polypeptide with phase behavior has an amino acid sequence of SEQ ID NO: 88.

[0151] In some embodiments, the polypeptide with phase behavior comprises an amino acid sequence of (GVGVPGVGVPGAGVPGVGVPGVGVP)ₘ (SEQ ID NO: 144) or (GVGVPGVGVPGLGVPGVGVPGVGVP)ₘ(SEQ ID NO: 146), wherein m is an integer between 2 and 32, inclusive of endpoints. In some embodiments, the polypeptide with phase behavior comprises an amino acid sequence of (GVGVPGVGVPGAGVPGVGVPGVGVP)ₘ(SEQ ID NO: 144), wherein m is 8 or 16. In some embodiments, the polypeptide with phase behavior comprises an amino acid sequence of (GVGVPGAGVP)ₘ (SEQ ID NO: 145), wherein m is an integer between 5 and 80, inclusive of endpoints. In some embodiments, the polypeptide with phase behavior comprises an amino acid sequence of (GXGVP)ₘ(SEQ ID NO: 147), wherein m is an integer between 10 and 160, inclusive of endpoints, and wherein X for each repeat is independently selected from the group consisting of glycine, alanine, valine, isoleucine, leucine, phenylalanine, tyrosine, tryptophan, lysine, arginine, aspartic acid, glutamic acid, and serine.

[0152] In some embodiments, the polypeptide with phase behavior comprises an amino acid sequence selected from

(a)
(SEQ ID NO: 143)
(GVGVP)ₘ;
(b)
(SEQ ID NO: 148)
(ZZPXXXXGZ)ₘ;
(c)
(SEQ ID NO: 149)
(ZZPXGZ)ₘ;
(d)
(SEQ ID NO: 150)
(ZZPXXGZ)ₘ;
or
(e)
(SEQ ID NO: 151)
(ZZPXXXGZ)ₘ,

wherein m is an integer between 10 and 160, inclusive of endpoints, wherein X if present is any amino acid except proline or glycine, and wherein Z if present is any amino acid.

[0153] In some embodiments, the polypeptide with phase behavior comprises an amino acid sequence of (GVGVP)ₘ (SEQ ID NO: 143), wherein m is 20, 40, or 80. In some embodiments, the polypeptide with phase behavior comprises an amino acid sequence of (GRGDXPZX)ₘ (SEQ ID NO: 152) or (XZPXDGRG)ₘ(SEQ ID NO: 153), wherein X is glutamine or serine, Z is tyrosine or valine, and m is an integer between 10 and 160, inclusive of endpoints.

[0154] In some embodiments, the polypeptide with phase behavior comprises a first set of repeat sequences and a second set of repeat sequences. The first set of repeat sequences and the second set of repeat sequences may each individually comprise sequences that are repeated one or more times. In some embodiments, the first set of repeat sequences any/or the second set of repeat sequences comprises a repeating sequence comprising any one of SEQ ID NOs: 1-17 and 143-153. In some embodiments, the polypeptide with phase behavior comprises a first set of repeat sequences and a second set of repeat sequences, wherein the first set of repeat sequences comprises the amino acid sequence of (GRGDXPZX)₄₀ (SEQ ID NO: 154) and the second set of repeat sequences comprises the amino acid sequence (GVGVP)₈₀ (SEQ ID NO: 155), wherein X is glutamine and Z is tyrosine. In some embodiments, polypeptide with phase behavior comprising a first set of repeat sequences and a second set of repeat sequences comprises the sequence of SEQ ID NO: 156. In some embodiments, the polypeptide with phase behavior comprises at least one, at least two, at least three, at least four, at least five, at least six, at least seven, at least eight, at least nine, or at least ten different sets of repeat sequences. In some embodiments, each set of repeat sequences within the polypeptide with phase behavior comprises sequences that repeat from about 5 to about 400 time, for example, about 5, about 10, about 15, about 20, about 25, about 30, about 35, about 40, about 45, about 50, about 55, about 60, about 65, about 70, about 75, about 80, about 85, about 90, about 95, about 100, about 105, about 110, about 115, about 120, about 125, about 130, about 135, about 140, about 145, about 150, about 155, about 160, about 165, about 170, about 175, about 180, about 185, about 190, about 195, about 200, about 205, about 210, about 215, about 220, about 225, about 230, about 235, about 240, about 245, about 250, about 255, about 260, about 265, about 270, about 275, about 280, about 285, about 290, about 295, about 300, about 305, about 310, about 315, about 320, about 325, about 330, about 335, about 340, about 345, about 350, about 355, about 360, about 365, about 370, about 375, about 380, about 385, about 390, about 395, or about 400 times.

[0155] In some embodiments, the polypeptide with phase behavior comprising an amino acid sequence selected from any one of SEQ ID NOs: 1-17, 88, and 143-153 also comprises up to 10 additional N-terminal and/or C-terminal amino acids. In some embodiments, the polypeptide with phase behavior comprising an amino acid sequence of any one of SEQ ID NOs: 1-17, 88, and 143-153 also comprises an additional N-terminal methionine. In some embodiments, the polypeptide with phase behavior comprising an amino acid sequence of any one of SEQ ID NOs: 1-17, 88, and 143-153 also comprises an additional C-terminal glycine.

[0156] In some embodiments, the polypeptide with phase behavior has the same amino acid composition of an ELP and/or RLP but does not comprise repeats. In some embodiments, the polypeptide with phase behavior comprises an amino acid sequence that is about 80%, about 85%, about 90%, about 95%, about 96%, about 97%, about 98%, about 99%, or about 100% identical to an ELP and/or RLP. In some embodiments, the polypeptide with phase behavior comprises an amino acid composition that is about 80%, about 85%, about 90%, about 95%, about 96%, about 97%, about 98%, about 99%, or about 100% identical to an ELP and/or RLP. In some embodiments, the polypeptide with phase behavior comprises a composition of hydrophobic amino acids that is about 80%, about 85%, about 90%, about 95%, about 96%, about 97%, about 98%, about 99%, or about 100% identical to an ELP and/or RLP.

[0157] In some embodiments, the polypeptide with phase behavior comprises a non-repetitive unstructured polypeptide. In some embodiments, the non-repetitive unstructured polypeptide has an amino acid sequence that comprises at least 50 amino acids. In some embodiments, the non-repetitive unstructured polypeptide has an amino acid sequence that comprises at least 50, at least 60, at least 70, at least 80, at least 90, or at least 100 amino acids. In some embodiments, the sequence of the non-repetitive unstructured polypeptide is at least about 10% proline (e.g., at least 10%, at least 20%, at least 30%, at least 40%, at least 50%, at least 60%, at least 70%, or at least 80%) and at least 20% glycine (e.g. at least 20%, at least 30%, at least 40%, at least 50%, at least 60%, at least 70%, at least 80%, or at least 90%). In some embodiments, the non-repetitive unstructured polypeptide has a sequence that comprises at least about 40% of amino acids selected from the group consisting of valine, alanine, leucine, lysine, threonine, isoleucine, tyrosine, serine, and phenylalanine.

[0158] In some embodiments, the non-repeated unstructured polypeptide comprises a sequence that does not comprise three contiguous identical amino acids, wherein any 5-10 amino acid subsequence does not occur more than once in the non-repeated unstructured polypeptide, and wherein when the non-repeated unstructured polypeptide comprises a subsequence starting and ending with proline, and wherein the subsequence further comprises at least one glycine.

[0159] In some embodiments, the ELPs and/or RLPs described herein are expressed as a component of a fusion protein. In some embodiments, a fusion protein comprises an ELP and/or an RLP and an AAV-binding polypeptide such as an AAVR ecodomain or a fragment or derivative thereof. In some embodiments, the fusion protein is expressed in bacteria or mammalian cells. In some embodiments, the fusion protein is expressed in Escherichia coli. In some embodiments, the fusion protein is expressed in insect cells. In some embodiments, the sequence of the non-repetitive unstructured polypeptide is at least about 10% proline (e.g. at least 10¹%, at least 20%, at least 30%, at least 40%) and at least 20% glycine (e.g. at least 20%, at least 30%, at least 40%, or at least 50%), and at least 40% (e.g. at least 40%, at least 50%, at least 60⁰%, or at least 70%) of amino acids selected from the group consisting of valine, alanine, leucine, lysine, threonine, isoleucine, tyrosine, serine, and phenylalanine.

[0160] In some embodiments, the non-repetitive unstructured polypeptide does not comprise three contiguous identical amino acids. In some embodiments, the non-repetitive unstructured polypeptide comprises a subsequence (e.g., a fragment of the non-repetitive unstructured polypeptide) which only occurs once in the non-repetitive unstructured polypeptide sequence. In some embodiments, the non-repetitive unstructured polypeptide comprises a subsequence that starts and ends with proline. In some embodiments, the non-repetitive unstructured polypeptide comprises a subsequence that comprises at least one glycine.

[0161] In some embodiments, the polypeptide with phase behavior comprises an amino acid sequence of (GVGVPGLGVPGVGVPGLGVPGVGVP)ₘ (SEQ ID NO: 12), wherein m is 16. In some embodiments, the polypeptide with phase behavior comprises an amino acid sequence of SEQ ID NO; 170.

[0162] In some embodiments, the polypeptide with phase behavior comprises a signal peptide.

### Binding of AAV to a Purification Matrix

[0163] In some embodiments, the present disclosure provides purification matrices comprising an AAV binding polypeptide, wherein the AAV binding polypeptide is coupled to a polypeptide with phase behavior and/or a support.

[0164] In some embodiments, the present disclosure provides purification matrices comprising a fusion protein comprising (i) an AAV binding polypeptide and (ii) a polypeptide with phase behavior, wherein the fusion protein is coupled to a support (e.g., a solid support). In some embodiments, the fusion protein is coupled to the support via a residue in the AAV binding polypeptide. In some embodiments, the fusion protein is coupled to the support via a residue in the polypeptide with phase behavior. In some embodiments, the fusion protein is coupled to the support via a residue in a linker between the AAV binding polypeptide and the support. In some embodiments, the binding and/or coupling to the support is reversible.

[0165] In some embodiments, a purification matrix is contacted with an AAV particle. In some embodiments, a purification matrix binds to an AAV particle to form a complex. In some embodiments, a purification matrix comprising a fusion protein comprising (i) an AAV binding polypeptide and (ii) a polypeptide with phase behavior binds to an AAV particle to form a complex. In some embodiments, a purification matrix comprising a fusion protein comprising (i) an AAV binding polypeptide and (ii) a polypeptide with phase behavior binds to an AAVparticle to form a complex.

[0166] In some embodiments, a purification matrix reversibly binds to an AAV. Reversible binding and/or reversible coupling means that the complexes can dissociate e.g. separate into individual components. For example, if a complex reversibly forms between the purification matrix and AAV particle, the purification matrix and AAV particle can subsequently dissociate. In some embodiments, reversible binding allows for separation of AAV particle from the purification matrix. In some embodiments, dissociation is triggered by an environmental factor. In some embodiments, reversible binding allows for separation of a contaminant and/or impurity from the purification matrix. In some embodiments, reversible binding allows for separation of the other molecule from the purification matrix.

[0167] In some embodiments, reversible binding is non-covalent, i.e. no covalent bonds are formed between the interacting components of the complex (such as between the purification matrix and the contaminant, biologic, and/or other molecule). In some embodiments, non-covalent interactions cause the purification matrix and the contaminant, biologic, and/or other molecule to bind to each other. Non-limiting examples of non-covalent interactions include dipole-dipole forces, van der Waals forces, London Dispersion forces, hydrogen bonding, hydrophobic interactions, and electrostatic interactions. In some embodiments, non-covalent binding is disrupted by the addition of an environmental factor.

[0168] In some embodiments, binding between the purification matrix and an AAV particle is covalent. In some embodiments, a covalent bond between a purification matrix and an AAV particle may be cleaved using, for example, a protease.

[0169] In some embodiments, the purification matrix is recyclable, meaning that it can be reused after one or more uses. In some embodiments, the purification matrix is regenerated after a first use, before it is used again. In some embodiments, the purification matrix is regenerated by incubating the purification matrix with guanidine hydrochloride. In some embodiments, the purification matrix is regenerated by incubating the purification matrix in guanidine hydrochloride at a concentration in the range of about 1 M to about 10 M, such as about 6 M. In some embodiments, the purification matrix is regenerated by incubating the purification matrix in sodium hydroxide. In some embodiments, the purification matrix is regenerated by incubating the purification matrix in sodium hydroxide at a concentration in the range of about 0.1 M to about 10 M, such as about 1M. The incubation may be, for example, about 1 to about 30 minutes, about 5 to about 10 minutes, or about 10 to about 10 minutes long. In some embodiments, the incubation is about five minutes long.

[0170] In some embodiments, the purification matrix is regenerated by incubating the purification matrix at an elevated temperature, such a temperature greater than 80° C., greater than 85° C., greater than 90° C., greater than 95° C., or greater than 100° C. The incubation may be, for example, about 1 to about 30 minutes, about 5 to about 10 minutes, or about 10 to about 10 minutes long. In some embodiments, the incubation is about five minutes long. In some embodiments, the purification matrix is regenerated by incubating the purification matrix at 95° C. for about five minutes.

[0171] In some embodiments, after purification of an AAV particle from a first composition comprising an AAV particle, the purification matrix is regenerated and used for capture of an AAV particle from an additional composition comprising an AAV particle. In some embodiments, the purification matrix can be reused for at least 5 cycles of purification, for example, at least about 5 cycles, at least about 6 cycles, at least about 7 cycles, at least about 8 cycles, at least about 9 cycles, at least about 10 cycles. Each cycle of purification refers to use of a purification matrix to purify an AAV particle from a composition comprising an AAV particle. Subsequent cycles refer to additional use of the same purification matrix to purify an AAV particle from additional compositions comprising an AAV particle. For example, in the third cycle of purification, the purification matrix is used for a third time to purify an AAV particle from a third composition comprising an AAV particle; the same purification matrix was previously used in a first cycle to purify an AAV particle from a first composition comprising an AAV particle and in a second cycle to purify an AAV particle from a second composition comprising an AAV particle.

[0172] In some embodiments, the purification matrix retains the ability to capture at least 95% of AAV particles from a composition after at least five purification cycles.

### Linkers

[0173] In some embodiments, the AAV-binding polypeptide is coupled to the polypeptide with phase behavior or support via a linker. In some embodiments, any linker that does not interfere with the function of the purification matrix may be utilized.

[0174] In some embodiments, the linker connects the AAV-binding polypeptide to the polypeptide with phase behavior. In some embodiments, the linker enables cooperative interactions between the polypeptide with phase behavior and the AAV-binding polypeptide. In some embodiments, the linker is a peptide. In some embodiments, the linker preserves the phase behavior of the polypeptide with phase behavior. In some embodiments, the linker preserves the Tₜ of the polypeptide with phase behavior. In some embodiments, the linker preserves the structure of the capture domain. In some embodiments, the linker comprises between 1 and 50 amino acids. In some embodiments, the linker comprises 1, 2, 3, 4, 5, 6, 7, 8, 9, 10, 11, 12, 13, 14, 15, 16, 17, 18, 19, 20, 21, 22, 23, 24, 25, 26, 27, 28, 29, 30, 31, 32, 33, 34, 35, 36, 37, 38, 39, 40, 41, 42, 43, 44, 45, 46, 47, 48, 49, or 50 amino acids.

[0175] In some embodiments, the stiffness of the linker is increased by the inclusion of proline in the linker amino acid sequence.

[0176] In some embodiments, the flexibility of a linker is increased by the inclusion of small polar amino acids, including threonine, serine, and glycine.

[0177] In some embodiments, the linker may adopt various secondary structures, including but not limited to α-helices, β-strands, and random coils. In some embodiments, the linker adopts an α-helix and comprises an amino acid repeat of (EAAAK)ₙ (SEQ ID NO; 18) where n is a repeat number from 1 to 20.

[0178] In some embodiments, the linker is comprised of (G₄S)ₙ (SEQ ID NO: 19) where n can be an integer from 1 to 30 (e.g. 1, 2, 3, 4, 5, 6, 7, 8, 9, 10, 11, 12, 13, 14, 15, 16, 17, 18, 19, 20). In embodiments, the polypeptide linker has a repeat of (SGGG)ₙ (SEQ ID NO: 20), wherein n is an integer from 1 to 50 (e.g. 1, 2, 3, 4, 5, 6, 7, 8, 9, 10, 11, 12, 13, 14, 15, 16, 17, 18, 19, 20). In embodiments, the polypeptide linker has a repeat of (GGGS)ₙ (SEQ ID NO: 21), wherein n is an integer from 1 to 20 (e.g. 1, 2, 3, 4, 5, 6, 7, 8, 9, 10, 11, 12, 13, 14, 15, 16, 17, 18, 19, or 20).

[0179] In some embodiments, the linker has an amino acid sequence of KESGSVSSEQLAQFRSLD (SEQ ID NO: 22). In some embodiments, the linker has an amino acid sequence of EGKSSGSGSESKST (SEQ ID NO: 23). In some embodiments, the linker only comprises glycine.

[0180] In some embodiments, the peptide linker comprises a protease cleavage site. In some embodiments, the protease cleavage site is a furin cleavage site.

[0181] In some aspects, the polypeptide linker is a poly-(Gly)ₙ linker, wherein n is 1-30, for example, 1, 2, 3, 4, 5, 6, 7, 8, 9, 10, 15, 16, 17, 18, 19, 20, 21, 22, 23, 24, 25, 26, 27, 28, 29, or 30 (SEQ ID NO: 48). In other embodiments, the linker is selected from the group consisting of: dipeptides, tripeptides, and quadripeptides. In embodiments, the linker is a dipeptide selected from the group consisting of alanine-serine (AS), leucine-glutamic acid (LE), and serine-arginine (SR).

[0182] In some embodiments, the linker is selected from GKSSGSGSESKS (SEQ ID NO: 157), GSTSGSGKSSEGKG (SEQ ID NO; 158), GSTSGSGKSSEGSGSTKG (SEQ ID NO: 159), GSTSGSGKPGSGEGSTKG (SEQ ID NO: 160), EGKSSGSGSESKEF (SEQ ID NO: 161), SRSSG (SEQ ID NO: 162), and SGSSC (SEQ ID NO: 163).

[0183] In some embodiments, the linker is a self-cleaving peptide. In some embodiments, the self-cleaving peptide is a 2A peptide. 2A peptides are a class of 18-22 amino acid long peptides that induce ribosomal skipping during translation of a protein in a cell. In some embodiments, the 2A peptide is a T2A peptide having an amino acid sequence of EGRGSLLTCGDVEENPGP (SEQ ID NO; 164), a P2A peptide having an amino acid sequence of ATNFSLLKQAGDVEENPGP (SEQ ID NO: 165), an E2A peptide having an amino acid sequence of QCTNYALLKLAGDVESNPGP (SEQ ID NO: 166), or an F2A peptide having an amino acid sequence of VKQTLNFDLLKLAGDVESNPGP (SEQ ID NO: 167). In some embodiments, the 2A peptide has at least 80%, at least 85%, at least 90%, at least 95%, or at least 98% identity to any one of SEQ ID NOs. 164-167. In some embodiments, the 2A peptide further comprises GSG (SEQ ID NO: 168) on its N-terminus.

[0184] In some embodiments, the linker is a chemical linker. In some embodiments, the chemical linker is selected from the group consisting of a carbohydrate linker, a lipid linker, a fatty acid linker, and a polyether linker.

[0185] In some embodiments, the linker is a direct covalent linkage between the support and an AAV-binding polypeptide. In some embodiments, the linker is a direct covalent linkage between an amino acid residue of the AAV-binding polypeptide with an amino acid residue of the polypeptide with phase behavior. In some embodiments, a fusion protein comprises the polypeptide with phase behavior and AAV-binding polypeptide. In some embodiments, the fusion protein further comprises one or more linkers as described herein. In some embodiments, a fusion protein comprises, from N-terminus to C-terminus, a polypeptide with phase behavior, a linker, and an AAV-binding polypeptide. In some embodiments, a fusion protein comprises, from N-terminus to C-terminus, an AAV-binding polypeptide, a linker, and a polypeptide with phase behavior.

[0186] In some embodiments, the AAV-binding polypeptide comprises one or more polycystic kidney domains (PKDs) wherein the PKDs are individually selected from PKD1, PKD2, PKD3, PKD4, and PKD5. In some embodiments, a linker separates two or more PKDs. In some embodiments, an AAV-binding polypeptide comprises, from N-terminus to C-terminus, a first PKD domain, a linker, and a second PKD domain. In some embodiments, an AAV-binding polypeptide comprises, from N-terminus to C-terminus, a first PKD domain, a linker, a second PKD domain, a linker, and at least one additional PKD domain.

[0187] In some embodiments, the linker comprises a fragment of an AAVR. In some embodiments, the linker is between 1 and 1200 amino acids in length. In some embodiments, the linker comprises 1, 2, 3, 4, 5, 6, 7, 8, 9, 10, 20, 30, 40, 50, 60, 70, 80, 90, 100, 125, 150, 175, 200, 225, 250, 275, 300, 325, 350, 375, 400, 425, 450, 475, 500, 525, 550, 575, 600, 625, 650, 675, 700, 725, 750, 775, 800, 825, 850, 875, 900, 925, 950, 975, 1000, 1025, 1050, 1075, 1100, 1125, 1150, 1175, 1200, 1225, or 1250 amino acids. In some embodiments, the linker has an amino acid sequence selected from any one of SEQ ID NOS: 24-27.

### Methods for Purifying AAV

[0188] In some embodiments, the present disclosure provides methods for purifying an AAV particle using the disclosed purification matrices.

[0189] In some embodiments, the purification matrix comprises (i) a polypeptide with phase behavior comprising an amino acid sequence of (GVGVPGLGVPGVGVPGLGVPGVGVP)ₘ (SEQ ID NO: 12), wherein m is 16, and (ii) an AAV binding polypeptide comprising an amino acid sequence of SEQ ID NO: 29. In some embodiments, the purification matrix comprises (i) a polypeptide with phase behavior comprising an amino acid sequence of (GVGVPGLGVPGVGVPGLGVPGVGVP)ₘ (SEQ ID NO: 12), wherein m is 16, and (ii) an AAV binding polypeptide comprising an amino acid sequence of SEQ ID NO: 52. In some embodiments, the purification matrix comprises (i) a polypeptide with phase behavior comprising an amino acid sequence of (GVGVPGLGVPGVGVPGLGVPGVGVP)ₘ (SEQ ID NO: 12), wherein m is 16, and (ii) an AAV binding polypeptide comprising an amino acid sequence of SEQ ID NO: 64.

[0190] In some embodiments, the purification matrix comprises (i) a polypeptide with phase behavior comprising an amino acid sequence of (GVGVPGLGVPGVGVPGLGVPGVGVP)ₘ (SEQ ID NO: 12), wherein m is 16, and (ii) an AAV binding polypeptide comprising an amino acid sequence of SEQ ID NO: 169. In some embodiments, the purification matrix comprises (i) a polypeptide with phase behavior comprising an amino acid sequence of SEQ ID NO: 170, and (ii) an AAV binding polypeptide comprising an amino acid sequence of SEQ ID NO: 169. In some embodiments, the purification matrix comprises an amino acid sequence of SEQ ID NO: 171, wherein the polypeptide with phase behavior comprises an amino acid sequence of SEQ ID NO: 170 and the AAV binding polypeptide comprises an amino acid sequence of SEQ ID NO: 169.

[0191] In some embodiments, the purification matrix comprises (i) a polypeptide with phase behavior comprising an amino acid sequence of SEQ ID NO: 88 and (ii) an AAV binding polypeptide comprising an amino acid sequence of SEQ ID NO: 29. In some embodiments, the purification matrix comprises (i) a polypeptide with phase behavior comprising an amino acid sequence of SEQ ID NO: 88, and (ii) an AAV binding polypeptide comprising an amino acid sequence of SEQ ID NO: 52. In some embodiments, the purification matrix comprises (i) a polypeptide with phase behavior comprising an amino acid sequence of SEQ ID NO: 88, and (ii) an AAV binding polypeptide comprising an amino acid sequence of SEQ ID NO: 64.

[0192] In some embodiments, the purification matrix comprises (i) a polypeptide with phase behavior comprising an amino acid sequence of (GVGVPGLGVPGVGVPGLGVPGVGVP)ₘ (SEQ ID NO: 12), wherein m is 16, and (ii) an AAV binding polypeptide comprising an amino acid sequence of SEQ ID NO: 29. In some embodiments, the purification matrix comprises (i) a polypeptide with phase behavior comprising an amino acid sequence of (GVGVPGLGVPGVGVPGLGVPGVGVP)ₘ(SEQ ID NO: 12), wherein m is 16, and (ii) an AAV binding polypeptide comprising an amino acid sequence of SEQ ID NO: 29, (iii) optionally up to about 10 additional amino acids at the N-terminus and/or C-terminus of the polypeptide with phase behavior and/or the AAV binding polypeptide, (iv) optionally a C-terminal glycine, and (v) optionally an N-terminal methionine.

[0193] In some embodiments, the purification matrix comprises (i) a polypeptide with phase behavior comprising an amino acid sequence of (GVGVPGLGVPGVGVPGLGVPGVGVP)ₘ (SEQ ID NO: 12), wherein m is 16, and (ii) an AAV binding polypeptide comprising an amino acid sequence of SEQ ID NO: 52. In some embodiments, the purification matrix comprises (i) a polypeptide with phase behavior comprising an amino acid sequence of (GVGVPGLGVPGVGVPGLGVPGVGVP)ₘ(SEQ ID NO: 12), wherein m is 16, and (ii) an AAV binding polypeptide comprising an amino acid sequence of SEQ ID NO: 52, (iii) an optional N-terminal methionine, (iv) an optional C-terminal glycine, and (v) optionally up to about 10 additional amino acids at the N-terminus and/or C-terminus of the polypeptide with phase behavior and/or the AAV binding polypeptide.

[0194] In some embodiments, the purification matrix comprises (i) a polypeptide with phase behavior comprising an amino acid sequence of (GVGVPGLGVPGVGVPGLGVPGVGVP)ₘ (SEQ ID NO: 12), wherein m is 16, and (ii) an AAV binding polypeptide comprising an amino acid sequence of SEQ ID NO: 64. In some embodiments, the purification matrix comprises (i) a polypeptide with phase behavior comprising an amino acid sequence of (GVGVPGLGVPGVGVPGLGVPGVGVP)ₘ (SEQ ID NO: 12), wherein m is 16, (ii) an AAV binding polypeptide comprising an amino acid sequence of SEQ ID NO: 64, (iii) an optional N-terminal methionine, (iv) an optional C-terminal glycine, and (v) optionally up to about 10 additional amino acids at the N-terminus and/or C-terminus.

[0195] In some embodiments, the purification matrix comprises a polypeptide with phase behavior comprising an amino acid sequence of SEQ ID NO: 88.

[0196] In some embodiments, the purification matrix comprises an AAV binding polypeptide comprising an amino acid sequence of any one of SEQ ID NOS: 29, 52, or 64.

[0197] In some embodiments, the purification matrix comprises an AAV binding polypeptide comprising the amino acid sequence of SEQ ID NO: 64.

[0198] In some embodiments, the purification matrix has an amino acid sequence of SEQ ID NO: 87. In some embodiments, the purification matrix has an amino acid sequence of SEQ ID NO: 171. In some embodiments, the purification matrix has an amino acid sequence of any one of SEQ ID Nos: 171-174 or 87.

[0199] In some embodiments, the methods allow for separation of AAV particles from one or more impurities (also called contaminants herein). In some embodiments, the impurities are any chemical or biologic that is not desired in an AAV composition. In some embodiments, the impurities are viruses, proteins, nucleic acids, lipopolysaccharides, lipids, mycotoxins, carbohydrates, and/or cells. In some embodiments, the cells include bacterial cells, animal cells, and human cells. In some embodiments, the cell is selected from the group consisting of a bacterial cell, yeast cell, or an animal cell such as a mammalian cell. In some embodiments, the cell is a chicken cell, a mouse cell, a guinea pig cell, a rat cell, a rabbit cell, a goat cell, a horse cell, a sheep cell, a dog cell, a cat cell, or a cow cell. In some embodiments, the cell is a human cell.

[0200] In some embodiments, the disclosure provides methods for purifying a wildtype or mutant AAV selected from AAV1, AAV2, AAV3 (including types 3A and 3B), AAV4, AAV5, AAV6, AAV7, AAV8, AAV9, AAV10, AAV11, AAV12, AAV13, AAVrh32.33, AAVrh8, AAVrh10, AAVrh74, AAVhu.68, avian AAV, bovine AAV, canine AAV, equine AAV, ovine AAV, snake AAV, bearded dragon AAV, AAV2i8, AAV2g9, AAV-LK03, AAV7m8, AAV Anc80, AAV PHP.B, and any other AAV now known or later discovered.

[0201] In some embodiments, the present disclosure provides a method for purifying AAV particles comprising contacting the AAV particles with a purification matrix comprising an AAV-binding polypeptide and a support, wherein the AAV-binding polypeptide is coupled to the support.

[0202] In some embodiments, the present disclosure provides a method for purifying AAV particles comprising contacting the AAV particles with a purification matrix comprising an AAV-binding polypeptide and a polypeptide with phase behavior, wherein the AAV-binding polypeptide is coupled to the polypeptide with phase behavior.

[0203] In some embodiments, a method of purifying an AAV particle comprises contacting the AAV particle with a purification matrix, wherein the purification matrix comprises (i) an AAV-binding polypeptide and (ii) a polypeptide with phase behavior; wherein the AAV particle binds to the purification matrix to form a complex; wherein the size of the complex is increased by a first environmental factor; wherein the complex is separated from at least one contaminant on the basis of size; and wherein the AAV particle is separated from the purification matrix by a second environmental factor.

[0204] In some embodiments, a method of purifying an AAV particle comprises contacting the AAV particle with a purification matrix, wherein the purification matrix comprises (i) an AAV-binding polypeptide and (ii) a polypeptide with phase behavior; wherein the AAV particle binds to the matrix to form a complex; wherein the size of the complex is increased; wherein the complex is separated from at least one contaminant on the basis of size; and wherein the AAV particle is separated from the matrix by an environmental factor.

[0205] In some embodiments, the methods described herein comprise the formation of a complex between an AAV particle and a purification matrix. In some embodiments, the AAV particle binds reversibly to a purification matrix. In some embodiments, the AAV particle binds to a purification matrix described herein through non-covalent interactions.

[0206] In some embodiments, a complex is formed between a purification matrix described herein and a wildtype or mutant AAV particle of a serotype selected from AAV1, AAV2, AAV3 (including types 3A and 3B), AAV4, AAV5, AAV6, AAV7, AAV8, AAV9, AAV10, AAV11, AAV12, AAV13, AAVrh32.33, AAVrh8, AAVrh10, AAVrh74, AAVhu.68, avian AAV, bovine AAV, canine AAV, equine AAV, ovine AAV, snake AAV, bearded dragon AAV, AAV2i8, AAV2g9, AAV-LK03, AAV7m8, AAV Anc80, AAV PHP.B, and any other AAV serotype now known or later discovered.

[0207] In some embodiments, a complex is formed between a purification matrix and an AAV particle having a wildtype AAV capsid protein. In some embodiments, the complex is formed between a purification matrix and an AAV particle having a mutant AAV capsid protein. In some embodiments, the complex is formed between a purification matrix and a human AAV particle. In some embodiments, the complex is formed between a purification matrix and a primate AAV particle. In some embodiments, the complex is formed between a purification matrix and a bovine AAV particle. In some embodiments, the complex is formed between a purification matrix and an avian AAV particle. In some embodiments, the complex is formed between a purification matrix and an orangutan AAV particle. In some embodiments, the complex is formed between a purification matrix and a monkey AAV particle. In some embodiments, the complex is formed between a purification matrix and a mouse AAV particle.

[0208] In some embodiments, an environmental factor is used to increase the size of the AAV-purification matrix complex. As used herein, the phrase “increase in size” may refer to an increase in the diameter of the complex or an increase in the mass of the complex. In some embodiments, the increase in size is an increase in the molar mass of the complex. In some embodiments, the increase in size is an increase in the hydrodynamic radius of the complex.

[0209] In some embodiments, the size of the complexes described herein increase after an environmental factor is applied. In some embodiments, the size of a complex formed between the purification matrix and biologic, contaminant, and/or other molecule increases. In some embodiments, the size of the initial complex increases as a result of aggregation of multiple complexes. In some embodiments, multiple complexes aggregate due to self-assembly of purification matrices. In some embodiments, multiple complexes aggregate due to the application of an environmental factor. In some embodiments, the size increase is stabilized by non-covalent interactions between multiple protein-based purification matrix molecules. In some embodiments, the size increase is stabilized by non-covalent interactions between the polypeptides with phase behavior. In some embodiments, the non-covalent interactions are dipole-dipole forces, van der Waals forces, London Dispersion forces, hydrogen bonding, hydrophobic interactions, and/or electrostatic interactions.

[0210] In some embodiments, the methods of the disclosure provide for the formation of multiple complexes in a mixture. In some embodiments, the size of all of complexes increase. In some embodiments, the size of some complexes increases, and the size of the other complexes remains constant. In some embodiments, the size of one complex increases, and the size of the other complex remains constant.

[0211] In some embodiments, the size of the complex increases by at least about 2-fold, at least about 5-fold, at least about 10-fold, at least about 15-fold, at least about 20-fold, at least about 25-fold, at least about 30-fold, at least about 35-fold, at least about 40-fold, at least about 45-fold, at least about 50-fold, at least about 55-fold, at least about 60-fold, at least about 65-fold, at least about 70-fold, at least about 75-fold, at least about 80-fold, at least about 85-fold, at least about 90-fold, at least about 95-fold, at least about 100-fold, or more. In some embodiments, the size of the initial complex increases by at least about 2-fold. In some embodiments, the size of the initial complex increases by at least about 5-fold. In some embodiments, the size of the initial complex increases by at least about 10-fold. In some embodiments, the size of the initial complex increases by at least about 25-fold.

[0212] In some embodiments, the increase in size of the complex can be observed visually with an unaided eye. For example, the increase in size of the complex may cause a composition comprising the complex to change color, clarity, viscosity, and/or may cause the complex to change solubility (e.g., to precipitate from solution), wherein such change is observable by a human without the use of any special equipment.

[0213] In some embodiments, a person of skill in the art may measure the increase in the size of the complex according to known methods in the art. In some embodiments, the increase in the size of the complex can be measured utilizing a technique selected from the group consisting of x-ray scattering, small angle x-ray scattering, wide angle x-ray scattering, dynamic light scattering, analytical ultracentrifugation, size exclusion chromatography, and photon correlation spectroscopy.

[0214] In some embodiments, the environmental factor is the first environmental factor added to the composition comprising the AAV particle and the purification matrix. Examples of environmental factors are provided throughout this disclosure.

[0215] In some embodiments, the AAV-purification matrix complex is separated from one or more impurities by washing the AAV-purification matrix complex. In some embodiments, washing the AAV-purification matrix does not interfere with binding of the AAV particle to the purification matrix. In some embodiments, the AAV-purification matrix complex is washed with a buffer. Non-limiting examples of buffers include sodium acetate, saline, glycine-HCL, cacodylate buffer, Tris-HCl, 4-(2-hydroxyethyl)-1-piperazineethanesulfonic acid (HEPES), 2-(N-morpholino)ethanesulfonic acid (MES), 3-(N-morpholino)propanesulfonic acid (MOPS), citrate, phosphate buffer, tris(hydroxymethyl)methylamino]propanesulfonic acid (TAPS), and tris(hydroxymethyl)aminomethane (Tris). In some embodiments, the buffer comprises one or more of arginine, histidine, urea, pluronic acid, and triton-x-100. In some embodiments, the AAV-purification matrix complex is washed with a solvent. Non-limiting examples of solvents include acetone, acetonitrile, dimethylformamide, water, ethanol, toluene, methyl acetate, and ethyl acetate.

[0216] In some embodiments, the AAV-purification matrix complex is separated from at least one impurity on the basis of size. In some embodiments, the AAV-purification matrix complex is separated from at least one impurity on the basis of diameter. In some embodiments, the AAV-purification matrix is separated from at least one impurity on the basis of radius. In some embodiments, the AAV-purification matrix is separated from at least one impurity on the basis of mass. In some embodiments, the AAV-purification matrix is separated from at least one impurity on the basis of molar mass. In some embodiments, the AAV-purification matrix is separated from at least one impurity on the basis of size by using a technique selected from the group consisting of centrifugation, tangential flow filtration, analytical ultracentrifugation, membrane chromatography, high performance liquid chromatography, size exclusion chromatography, normal flow filtration, acoustic wave separation, centrifugation, counterflow centrifugation, and fast protein liquid chromatography.

[0217] In some embodiments, the AAV-purification matrix complex is separated from at least one impurity on the basis of size using centrifugation. In some embodiments, between about 100 relative centrifugal force (RCF) and about 16,000 RCF, for example, about 500 to about 16,000 RCF, about 1,000 RCF to 16,000 RCF, are applied to separate the AAV-purification matrix complex from at least one impurity. In some embodiments, at least 500 relative centrifugal force (RCF) are applied to separate the AAV-purification matrix complex from at least one impurity, for example, at least about 500 RCF, at least about 600 RCF, at least about 700 RCF, at least about 800 RCF, at least about 900 RCF, at least about 1000 RCF, at least about 2000 RCF, at least about 3000 RCF, at least about 3500 RCF, at least about 4000 RCF, at least about 5000 RCF, at least about 6000 RCF, at least about 7000 RCF, at least about 8000 RCF, at least about 9000 RCF, at least about 10,000 RCF, at least about 11,000 RCF, at least about 12,000 RCF, at least about 13,000 RCF, at least about 14,000 RCF, at least about 15,000 RCF, at least about 16,000 RCF, at least about 17,000 RCF, at least about 18,000 RCF, at least about 19,000 RCF, or at least about 20,000 RCF.

[0218] In some embodiments, the AAV-purification matrix is separated from at least one impurity on the basis of size by using TFF. In some embodiments, TFF may be used to separate the AAV-purification matrix from at least one impurity on the basis of size, a process also referred to herein as “diafiltration.” Diafiltration comprises both washing and elution steps. Washing removes impurities contained in the composition comprising the AAV-purification matrix. Elution separates purified AAV particles from the purification matrix. In some embodiments, the AAV-purification matrix is concentrated using TFF. In some embodiments, TFF may be used to increase the concentration of an AAV-purification matrix within a composition, a process also referred to herein as “concentration.”

[0219] Tangential flow filtration employs both microfiltration and ultrafiltration membranes to separate and/or concentrate molecules. Microfiltration membranes typically have pore sizes between 0.1 μm and 10 μm. Ultrafiltration membranes typically have smaller pore sizes than microfiltration membranes with pore sizes between 0.001 μm and 0.1 μm. In some embodiments, a membrane with a pore size between about 0.001 μm and about 10 μm is utilized in the methods of the disclosure. In some embodiments, the membrane has a pore size of about 0.001 μm, about 0.01 μm, about 0.05 μm, about 0.1 μm, about 0.2 μm, about 0.3 μm, about 0.4 μm, about 0.5 μm, about 0.6 μm, about 0.7 μm, about 0.8 μm, about 0.9 μm, about 1.0 μm, about 2 μm, about 3 μm, about 4 μm, about 5 μm, about 6 μm, about 7 μm, about 8 μm, about 9 μm, or about 10 μm, including all values and ranges in between thereof. In some embodiments, the membrane has a pore size of about 0.1 μm. In some embodiments, the membrane has a pore size of about 0.2 μm.

[0220] In some embodiments, the membrane is made of hydrophilized poly(vinylildene difluoride) (PVDF), polyetheresulfone (PES), cellulose phosphate, diethylaminoethyl cellulose, polysufone, regenerated cellulose, nylon, cellulose nitrate, cellulose acetate, pegylated PES, and sulfonated PES.

[0221] In TFF, a membrane is placed tangentially to the flow of a fluid mixture to cause the fluid mixture to flow tangentially over a first side of the membrane. At the same time, a fluid media is placed in contact with a second surface of the membrane. A transmembrane pressure is the force that drives fluid through the membrane, carrying along permeable molecules.

[0222] In some embodiments, separation of the complex of AAV and purification matrix from the one or more contaminants or impurities on the basis of size is performed using TFF with a transmembrane pressure of between about 0.1 bar to about 3 bar. In some embodiments, the transmembrane pressure is about 0.1 bar, about 0.2 bar, about 0.3 bar, about 0.4 bar, about 0.5 bar, about 0.6 bar, about 0.7 bar, about 0.8 bar, about 0.9 bar, about 1.0 bar, about 1.1 bar, about 1.2 bar, about 1.3 bar, about 1.4 bar, about 1.5 bar, about 1.6 bar, about 1.7 bar, about 1.8 bar, about 1.9 bar, about 2.0 bar, about 2.1 bar, about 2.2 bar, about 2.3 bar, about 2.4 bar, about 2.5 bar, about 2.6 bar, about 2.7 bar, about 2.8 bar, about 2.9 bar, or about 3.0 bar, including all values and ranges in between thereof. In some embodiments, the transmembrane pressure is about 1.5 bar.

[0223] In some embodiments, the cross flow rate is tuned to improve the separation of the complex of AAV particle and purification matrix described herein from the one or more contaminants. The cross flow rate is the rate of solution flow through the feed channel and across the membrane. It provides the force that sweeps away molecules that can restrict filtrate flow. In some embodiments, the cross flow rate is between about 500 L/m²/h and about 2000 L/m²/h. In some embodiments, the cross flow rate is between about 500 L/m²/h, about 600 L/m²/h, about 700 L/m²/h, about 800 L/m²/h, about 900 L/m²/h, about 1000 L/h, about 1100 L/m²/h, about 1200 L/m²/h, about 1300 L/m²/h, about 1400 L/m²/h, about 1500 Lm/h, about 1600 L/m²/h, about 1700 L/m²/h, about 1800 L/m²/h, about 1900 L/m²/h, or about 2000 L/m²/h, including all values and ranges in between thereof. In some embodiments, the cross flow rate is about 960 Lm/h. In some embodiments, TFF separation occurs by using a membrane that retains the complex comprising the purification matrix and the AAV particle while passing the contaminant.

[0224] In some embodiments, the AAV particle is eluted from the AAV-purification matrix complex by changing the pH of the composition comprising the AAV-purification matrix complex. In some embodiments, the pH is increased by about 0.1, about 0.2, about 0.3, about 0.4, about 0.5, about 0.6, about 0.7, about 0.8, about 0.9, about 1.0, about 1.1, about 1.2, about 1.3, about 1.4, about 1.5, about 1.6, about 1.7, about 1.8, about 1.9, about 2.0, about 2.1, about 2.2, about 2.3, about 2.4, about 2.5, about 2.6, about 2.7, about 2.8, about 2.9, about 3.0, about 3.1, about 3.2, about 3.3, about 3.4, about 3.5, about 3.6, about 3.7, about 3.8, about 3.9, about 4.0, about 4.1, about 4.2, about 4.3, about 4.4, about 4.5, about 4.6, about 4.7, about 4.8, about 4.9, about 5.0, about 5.1, about 5.2, about 5.3, about 5.4, about 5.5, about 5.6, about 5.7, about 5.8, about 5.9, or about 6.0 units. In some embodiments, the pH is decreased by about 0.1, about 0.2, about 0.3, about 0.4, about 0.5, about 0.6, about 0.7, about 0.8, about 0.9, about 1.0, about 1.1, about 1.2, about 1.3, about 1.4, about 1.5, about 1.6, about 1.7, about 1.8, about 1.9, about 2.0, about 2.1, about 2.2, about 2.3, about 2.4, about 2.5, about 2.6, about 2.7, about 2.8, about 2.9, about 3.0, about 3.1, about 3.2, about 3.3, about 3.4, about 3.5, about 3.6, about 3.7, about 3.8, about 3.9, about 4.0, about 4.1, about 4.2, about 4.3, about 4.4, about 4.5, about 4.6, about 4.7, about 4.8, about 4.9, about 5.0, about 5.1, about 5.2, about 5.3, about 5.4, about 5.5, about 5.6, about 5.7, about 5.8, about 5.9, or about 6.0 units. In some embodiments, the AAV particle is eluted from the AAV-purification matrix complex at a pH of about 2. In some embodiments, the AAV particle is eluted from the AAV-purification matrix complex at a pH of about 3 allows.

[0225] In some embodiments, the AAV particle is eluted from the AAV-purification matrix complex by changing the temperature of the composition comprising the AAV-purification matrix complex. In some embodiments, the temperature is increased 0.5° C., about 1° C., about 2° C., about 3° C., about 4° C., about 5° C., about 6° C., about 7° C., about 8° C., about 9° C., about 10° C., about 11° C., about 12° C., about 13° C., about 14° C., about 15° C., about 16° C., about 17° C., about 18° C., about 19° C., about 20° C., about 21° C., about 22° C., about 23° C., about 24° C., about 25° C., about 26° C., about 27° C., about 28° C., about 29° C., about 30° C., about 31° C., about 32° C., about 33° C., about 34° C., about 35° C., about 36° C., about 37° C., about 38° C., about 39° C., or about 40° C. In some embodiments, the temperature is decreased about 0.5° C., about 1° C., about 2° C., about 3° C., about 4° C., about 5° C., about 6° C., about 7° C., about 8° C., about 9° C., about 10° C., about 11° C., about 12° C., about 13° C., about 14° C., about 15° C., about 16° C., about 17° C., about 18° C., about 19° C., about 20° C., about 21° C., about 22° C., about 23° C., about 24° C., about 25° C., about 26° C., about 27° C., about 28° C., about 29° C., about 30° C., about 31° C., about 32° C., about 33° C., about 34° C., about 35° C., about 36° C., about 37° C., about 38° C., about 39° C., or about 40° C.

[0226] In some embodiments, the AAV particle is eluted from the AAV-purification matrix complex by changing the ionic strength of the composition comprising the AAV-purification matrix complex. In some embodiments, the change in ionic strength is brought about by increasing the concentration of salt. In some embodiments, the change in ionic strength is brought about by decreasing the concentration of salt. Non-limiting examples of salts include sodium chloride, potassium chloride, ammonium chloride, sodium acetate, sodium citrate, glycine, arginine, copper sulfate, sodium iodide, ammonium sulfate, and sodium sulfate. In some embodiments, a dialysis is used to change the concentration of salt in the composition comprising the protein-based purification matrix and biologic, contaminant, and/or molecule.

[0227] In some embodiments, the AAV particle is eluted from the AAV-purification matrix complex by addition of a reducing agent to the composition comprising the AAV-purification matrix complex. In some embodiments, the one or more reducing agents is selected from the group consisting of dithiothreitol (DTT), 2-mercaptoethanol (BME), Tris (2-carboxyethyl) phosphine (TCEP), hydrazine, boron hydrides, amine boranes, lower alkyl substituted amine boranes, triethanolamine, and N,N,N′,N′-tetramethylethylenediamine (TEMED).

[0228] In some embodiments, an environmental factor is used to elute the AAV particle from the AAV-purification matrix complex. In some embodiments, the environmental factor is the first environmental factor added to the composition comprising the AAV particle and the AAV-purification matrix complex. In some embodiments, the environmental factor is the second environmental factor added to the composition comprising the AAV particle and the AAV-purification matrix complex. Non-limiting examples of environmental factors are provided throughout this disclosure.

[0229] In some embodiments, the method of purifying AAV particles using a purification matrix described herein is completed in about 30 minutes to about 24 hours. In some embodiments, the methods described herein are completed in about 30 minutes to about 24 hours. In some embodiments, the methods are completed in about 30 minutes, about 1 hr, about 2 hr, about 3 hr, about 4 hr, about 5 hr, about 6 hr, about 7 hr, about 8 hr, about 9 hr, about 10 hr, about 11 hr, about 12 hr, about 13 hr, about 14 hr, about 15 hr, about 16 hr, about 17 hr, about 18 hr, about 19 hr, about 20 hr, about 21 hr, about 22 hr, about 23 hr, or about 24 hr. In some embodiments, the method of purifying AAV particles using a purification matrix described herein is completed in about 2 hours to about 10 hours.

[0230] In some embodiments, the purification yield of the AAV particles is at least 70%, at least 80%, at least 90%, at least 95%, at least 96%, at least 97%, at least 98%, or at least 99%.

[0231] In some embodiments, the AAV particles are purified to at least 70%, at least 80%, at least 90%, at least 95%, at least 96%, at least 97%, at least 98%, or at least 99% purity.

[0232] In some embodiments, the methods described herein enable the purification of at least 0.1 kg, at least about 0.2 kg, at least about 0.3 kg, at least about 0.4 kg, at least about 0.5 kg, at least about 0.6 kg, at least about 0.7 kg, at least about 0.8 kg, at least about 0.9 kg, at least about 1 kg, at least about 2 kg, at least about 3 kg, at least about 4 kg, at least about 5 kg, at least about 6 kg, at least about 7 kg, at least about 8 kg, at least about 9 kg, at least about 10 kg, or more of AAV per day, including all values and ranges in between thereof.

[0233] In some embodiments, the AAV particles retain their biological activity and/or structure. In some embodiments, the purified AAV particles have enhanced biological activity.

[0234] In some embodiments, the purified AAV particles retain about 95% of their infectivity after purification. In some embodiments, the purified AAV particles retain about 96% of their infectivity after purification. In some embodiments, the purified AAV particles retain about 97⁰/% of their infectivity after purification. In some embodiments, the purified AAV particles retain about 98% of their infectivity after purification. In some embodiments, the purified AAV particles retain about 99% of their infectivity after purification. In some embodiments, the purified AAV particles retain about 100%/6 its infectivity after purification.

[0235] In some embodiments, a composition comprising AAV particles purified using the matrix disclosed herein is enriched for AAV particles that are “full.” Full AAV particles include the desired genomic material (e.g., an AAV genome or transfer cassette), encapsidated within the AAV capsid. Empty AAV particles lack the desired genomic material.

[0236] There are several techniques for determining the relative amount of full and empty particles in a sample. For example, the total number of AAV particles present in a sample eluted from the purification matrix of the disclosure may be determined using an ELISA. In some embodiments, the number of viral genomes present in a sample eluted from the purification matrix of the disclosure may be determined using quantitative polymerase chain reaction (qPCR). In some embodiments, qPCR primers target the inverted terminal repeat (ITR) sequence. qPCR utilizing primers that target the ITR sequence is referred to herein as “TTR qPCR”. The ratio of the number of viral genomes to the total number of AAV particles provides an approximation of the ratio of full particles to total particles. In some embodiments, a qPCR:ELISA value (e.g. the number of viral genomes present in the sample: the total number of AAV particles present in the sample) is used to approximate the ratio of full particles relative to total particles.

[0237] In some embodiments, the qPCR:ELISA value increases after purification with a purification matrix of the disclosure. In some embodiments, after purification with a purification matrix of the disclosure, the qPCR:ELISA value of the sample increases by at least about 25%, for example at least about 25%, at least about 30%, at least about 35%, at least about 40%, at least about 45%, at least about 50%, at least about 55%, at least about 60%, at least about 65%, at least about 70%, at least about 75%, at least about 80%, at least about 85%, at least about 90%, at least about 95%, or at least about 100%, compared to the qPCR ELISA value of the sample before purification. In some embodiments, after purification with a purification matrix of the disclosure, the qPCR:ELISA value of the sample increases by at least about 50% compared to the qPCR: ELISA value of the sample before purification.

### Methods for Stabilizing AAV Particles

[0238] The instant inventors have discovered that the purification matrices described herein may unexpectedly help stabilize AAV particles during production, purification, and/or storage thereof. As used herein with relation to an AAV particle, the term “stabilize” or “stabilizing” refers to the ability of a purification matrix to reduce degradation or aggregation of an AAV sample comprising a plurality of AAV particles, to prevent AAV particles from binding other proteins (e.g., a cellular AAV receptor), or to enhance synthesis by a producer cell.

[0239] Thus, in some embodiments, an AAV particle is contacted with a purification matrix during production, purification, or storage thereof. In some embodiments, a method of increasing yield of AAV particles during production thereof comprises culturing AAV-producing cells in the presence of a purification matrix. In some embodiments, a method of stabilizing AAV particles during production thereof comprises culturing AAV-producing cells in the presence of a purification matrix. In some embodiments, a method of stabilizing AAV particles during purification thereof comprises contacting the AAV particles with a purification matrix during purification thereof. In some embodiments, a method of stabilizing AAV particles during storage thereof comprises storing the AAV particles in the presence of a purification matrix. In some embodiments, a method of increasing the shelf-life of AAV particles comprises storing the AAV particles in the presence of a purification matrix.

[0240] For example, a purification matrix may be contacted with an AAV particle during production in culture. AAV particles are typically produced in production cell lines, such as HEK293 cells or Sf9 cells. In some embodiments, the production cell lines are transfected with one or more plasmids containing various genes required to produce AAV (e.g., a triple transfection protocol). In some embodiments, the production cell lines are infected with baculoviral constructs containing various genes required to produce AAV. Adding the purification matrix to the AAV production cells in culture (e.g., by adding it to the tissue culture media) may increase the yield and/or quality of AAV particles obtained during this process. In some embodiments, the purification matrix may be added to the culture at a concentration of about 1 μM to about 1 mM, for example, about 1 μM, about 2 μM, about 3 μM, about 4 μM, about 5 μM, about 6 μM, about 7 μM, about 8 μM, about 9 μM, about 10 μM, about 20 μM, about 30 μM, about 40 μM, about 50 μM, about 60 μM, about 70 μM, about 80 μM, about 90 μM, about 100 μM, about 150 μM, about 200 μM, about 250 μM, about 300 μM, about 350 μM, about 400 μM, about 450 μM, about 500 μM, about 550 μM, about 600 μM, about 650 μM, about 700 μM, about 750 μM, about 800 μM, about 850 μM, about 900 μM, about 950 μM, or about 1 mM, including all values and ranges in between. In some embodiments, the purification matrix is added to culture at a concentration of about 10 μM. In some embodiments, the purification matrix is added to culture at a concentration of about 100 μM. Without being bound by any theory, it is believed that the purification matrix can bind to and/or physically surround AAV particles as they are produced, thereby preventing them from binding other proteins, including cellular receptors for the AAV particle. Thus, an AAV produced by a cultured cell and secreted into culture medium, in the presence of purification matrix, would not be able to re-infect a producer cell. In some embodiments, adding a purification matrix to AAV production cell lines in culture may increase the yield of AAV particles. For example, adding a purification matrix to AAV production cell lines in culture may result in an increase in viral titer obtained by at least 2-fold, at least 3-fold, at least 4-fold, at least 5-fold, at least 6-fold, at least 7-fold, at least 8-fold, at least 9-fold, at least 10-fold, at least 50-fold, at least 100-fold, or more, compared to cells cultured without the purification matrix.

[0241] As another example, after a purified AAV sample is prepared (using the methods described herein, or other methods known in the art), a purification matrix may be added to the sample before storage (e.g., freezing). Without being bound by any theory, it is believed that the purification matrix can bind to and/or physically surround AAV particles, thus preventing them from aggregating with other AAV particles, and also helping to protect them from degradation, particularly during multiple freeze-thaw cycles. Aggregation of AAV particles may be observed visually by microscopy and/or by a technique selected from the group consisting of x-ray scattering, laser diffraction, analytical ultracentrifugation, dynamic light scattering, nanoparticle tracking analysis, resonant mass measurement, size exclusion chromatography, gel permeation chromatography, light obscuration, and combinations thereof. In some embodiments, the AAV particle may be frozen and stored in the presence of a purification matrix at temperatures between about −80° C. and about 40° C., for example, about −80° C., about −75° C., about −70° C., about −65° C., about −60° C., about −55° C., about −50° C., about −45° C., about −40° C., about −35° C., about −30° C., about −25° C., about −20° C., about −15° C., about −10° C., about −5° C., about 0° C., about 4° C., about 5° C., about 10° C., about 15° C., about 20° C., about 25° C., about 30° C., about 35° C., or about 40° C.

[0242] In some embodiments, when an AAV particle is stored in the presence of a purification matrix, the shelf life of the AAV particle is at least about 10% longer as compared to a sample stored in the absence of purification matrix. For example, in some embodiments, the shelf life is at least about 10%, at least about 20%, at least about 30%, at least about 40%, at least about 50%, at least about 60%, at least about 70%, at least about 80%, at least about 90%, at least about 100%, at least about 150%, at least about 200%, at least about 250%, at least about 300%, at least about 350%, at least about 400%, at least about 450%, or at least about 500% longer than the shelf life of a AAV stored in the absence of a purification matrix at about the same temperature.

[0243] In some embodiments, an AAV sample is stored at about −80° C. in the presence of a purification matrix. In some embodiments, an AAV sample is stored at about −20° C. in the presence of a purification matrix. In some embodiments, an AAV sample is stored at about 4° C. in the presence of a purification matrix. In some embodiments, when AAV is stored in the presence of a purification matrix at about −80° C., about −20° C., or about 4° C., the shelf life of AAV is at least about 10% longer than if it was stored in the absence of the purification matrix. For example, the shelf life of the AAV particle may be at least about 10%, at least about 20%, at least about 30%, at least about 40%, at least about 50%, at least about 60%, at least about 70%, at least about 80%, at least about 90%, at least about 100%, at least about 150%, at least about 200%, at least about 250%, at least about 300%, at least about 350%, at least about 400%, at least about 450%, or at least about 500% longer than the shelf life of AAV stored in the absence of a purification matrix at the same temperature. As used herein, increased shelf life may refer to an increase in the amount of time an AAV sample is stored and still retains substantially the same level of infectivity.

[0244] In some embodiments, use of the purification matrix to stabilize AAV particles during production, purification, and/or storage thereof may increase the yield of “full” AAV particles. Thus, in some embodiments, improved stabilization of AAV particles upon contact with a purification matrix may be measured by quantitating the number of full AAV particles as compared to empty particles. In some embodiments, use of a purification matrix during production, purification, and/or storage of an AAV sample may result in an increased qPCR: ELISA value, as compared to an AAV sample that is not produced, purified, and/or stored in the presence of a purification matrix.

### Environmental Factors

[0245] In some embodiments, the methods of the disclosure provide one or more environmental factors to the compositions comprising a purification matrix and an AAV particle. In some embodiments, one or more environmental factors are applied to the compositions comprising a purification matrix and an AAV particle. Application of an environmental factor causes a change in the composition comprising the purification matrix and an AAV particle. In some embodiments, an environmental factor is used to increase the size of the AAV-purification matrix complex. In some embodiments, the environmental factor is used to remove one or more impurities from the composition comprising the AAV-purification matrix complex. In some embodiments, the environmental factor is used to elute one or more AAV particles from the purification-matrix complex. In some embodiments, the one or more environmental factors cause the size of the complex between the protein-based purification matrix and biologic, contaminant, and/or molecule to increase. In some embodiments, the one or more environmental factors cause a polypeptide with phase behavior to aggregate. In some embodiments, the one or more environmental factors enables an AAV particle to retain its native structure, function, and activity. In some embodiments, the one or more environmental factors enables an AAV particle to enhance its native structure, function, and activity.

[0246] In some embodiments, the environmental factor is a change in temperature. In some embodiments, the temperature is increased by about 0.5° C., about 1° C., about 2° C., about 3° C., about 4° C., about 5° C., about 6° C., about 7° C., about 8° C., about 9° C., about 10° C., about 11° C., about 12° C., about 13° C., about 14° C., about 15° C., about 16° C., about 17° C., about 18° C., about 19° C., about 20° C., about 21° C., about 22° C., about 23° C., about 24° C., about 25° C., about 26° C., about 27° C., about 28° C., about 29° C., about 30° C., about 31° C., about 32° C., about 33° C., about 34° C., about 35° C., about 36° C., about 37° C., about 38° C., about 39° C., or about 40° C. In some embodiments, the temperature is decreased by about 0.5° C., about 1° C., about 2° C., about 3° C., about 4° C., about 5° C., about 6° C., about 7° C., about 8° C., about 9° C., about 10° C., about 11° C., about 12° C., about 13° C., about 14° C., about 15° C., about 16° C., about 17° C., about 18° C., about 19° C., about 20° C., about 21° C., about 22° C., about 23° C., about 24° C., about 25° C., about 26° C., about 27° C., about 28° C., about 29° C., about 30° C., about 31° C., about 32° C., about 33° C., about 34° C., about 35° C., about 36° C., about 37° C., about 38° C., about 39° C., or about 40° C.

[0247] In some embodiments, the environmental factor is a change in pH. In some embodiments, the pH is increased by about 0.1, about 0.2, about 0.3, about 0.4, about 0.5, about 0.6, about 0.7, about 0.8, about 0.9, about 1.0, about 1.1, about 1.2, about 1.3, about 1.4, about 1.5, about 1.6, about 1.7, about 1.8, about 1.9, about 2.0, about 2.1, about 2.2, about 2.3, about 2.4, about 2.5, about 2.6, about 2.7, about 2.8, about 2.9, about 3.0, about 3.1, about 3.2, about 3.3, about 3.4, about 3.5, about 3.6, about 3.7, about 3.8, about 3.9, about 4.0, about 4.1, about 4.2, about 4.3, about 4.4, about 4.5, about 4.6, about 4.7, about 4.8, about 4.9, about 5.0, about 5.1, about 5.2, about 5.3, about 5.4, about 5.5, about 5.6, about 5.7, about 5.8, about 5.9, or about 6.0 units.

[0248] In some embodiments, the pH is decreased by about 0.1, about 0.2, about 0.3, about 0.4, about 0.5, about 0.6, about 0.7, about 0.8, about 0.9, about 1.0, about 1.1, about 1.2, about 1.3, about 1.4, about 1.5, about 1.6, about 1.7, about 1.8, about 1.9, about 2.0, about 2.1, about 2.2, about 2.3, about 2.4, about 2.5, about 2.6, about 2.7, about 2.8, about 2.9, about 3.0, about 3.1, about 3.2, about 3.3, about 3.4, about 3.5, about 3.6, about 3.7, about 3.8, about 3.9, about 4.0, about 4.1, about 4.2, about 4.3, about 4.4, about 4.5, about 4.6, about 4.7, about 4.8, about 4.9, about 5.0, about 5.1, about 5.2, about 5.3, about 5.4, about 5.5, about 5.6, about 5.7, about 5.8, about 5.9, or about 6.0 units.

[0249] In some embodiments, the environmental factor is change in ionic strength. In some embodiments, the change in ionic strength is brought about by increasing the concentration of salt. In some embodiments, the change in ionic strength is brought about by decreasing the concentration of salt. Non-limiting examples of salts include sodium chloride, potassium chloride, magnesium chloride, calcium chloride ammonium chloride, sodium acetate, sodium citrate, copper sulfate, sodium iodide, and sodium sulfate. In some embodiments, the salt has a concentration of between about 0.1 M and about 5 M, for example, about 0.1 M, about 0.2 M, about 0.3 M, about 0.4 M, about 0.5 M, about 0.6 M, about 0.7 M, about 0.8 M, about 0.9 M, about 1 M, about 1.1 M, about 1.2 M, about 1.3 M, about 1.4 M, about 1.5 M, about 1.6 M, about 1.7 M, about 1.8 M, about 1.9 M, about 2 M, about 2.1 M, about 2.2 M, about 2.3 M, about 2.4 M, about 2.5 M, about 2.6 M, about 2.7 M, about 2.8 M, about 2.9 M, about 3 M, about 3.1 M, about 3.2 M, about 3.3 M, about 3.4 M, about 3.5 M, about 3.6 M, about 3.7 M, about 3.8 M, about 3.9 M, about 4 M, about 4.1 M, about 4.2 M, about 4.3 M, about 4.4 M, about 4.5 M, about 4.6 M, about 4.7 M, about 4.8 M, about 4.9 M, or about 5 M. In some embodiments, the salt has a concentration of 0.6 M. In some embodiments, dialysis is used to change the concentration of salt in the composition comprising the protein-based purification matrix and biologic, contaminant, and/or molecule.

[0250] In some embodiments, the environmental factor is the addition of a cofactor. Non-limiting examples of cofactors include calcium, magnesium, cobalt, copper, zinc, iron, manganese, selenium, molybdenum, potassium, coenzyme A (CoA), a nucleoside triphosphate, and a vitamin (e.g., vitamin A, B, C, D, or F). In some embodiments, the cofactor is calcium. In some embodiments, the nucleoside triphosphate is adenosine triphosphate, uridine triphosphate, guanosine triphosphate, cytidine triphosphate, or thymidine triphosphate. In some embodiments, the vitamin is a fat-soluble. In some embodiments, the vitamin is water-soluble. Non-limiting examples of vitamins include vitamin A, vitamin B1 (thiamine), vitamin B2 (riboflavin), vitamin B3 (niacin or niacinamide), vitamin B5 (pantothenic acid), Vitamin B6 (pyridoxine, pyridoxal, or pyridoxamine, or pyridoxine hydrochloride), vitamin B7 (biotin), vitamin B9 (folic acid), vitamin B12, vitamin C, vitamin D, Vitamin E, vitamin K, K1, and K2, folic acid, and biotin.

[0251] In some embodiments, the environmental factor is a change in the concentration of the protein-based purification matrix. In some embodiments, the environmental factor is a change in the concentration of the biologic, contaminant, and/or molecule.

[0252] In some embodiments, the environmental factor is a change in pressure of the composition comprising the protein-based purification matrix and biologic, contaminant, and/or molecule. In some embodiments, a change in pressure can be effected by increasing or decreasing the volume of the composition.

[0253] In some embodiments, the environmental factor is the addition of one or more surfactants. In some embodiments, the one or more surfactants are free fatty acid salts, soaps, fatty acid sulfonates, such as sodium lauryl sulfate, ethoxylated compounds, such as ethoxylated propylene glycol, lecithin, polygluconates, quaternary ammonium salts, lignin sulfonates, 3-((3-cholamidopropyl) dimethylammonio)-1-propanesulfonate (CHAPS), sugars, including sucrose and glucose, Triton X-100, and NP-40. In some embodiments, the surfactant is anionic, nonionic, or amphoteric.

[0254] In some embodiments, the environmental factor is the addition of one or more molecular crowding agents. Non-limiting examples of molecular crowding agents include polyethylene glycol, dextran, and ficoll. PEGS may include PEG400, PEG1450, PEG3000, PEG8000, and PEG10000.

[0255] In some embodiments, the environmental factor is the addition of one or more oxidizing agents. Non-limiting examples of oxidizing agents include hydrogen peroxide, hydrophilically or hydrophobically activated hydrogen peroxide, preformed peracids, monopersulfate or hypochlorite.

[0256] In some embodiments, the environmental factor is the addition of one or more reducing agents. In some embodiments, the one or more reducing agents is selected from the group consisting of dithiothreitol (DTT), 2-mercaptoethanol (BME), Tris (2-carboxyethyl) phosphine (TCEP), hydrazine, boron hydrides, amine boranes, lower alkyl substituted amine boranes, triethanolamine, and N,N,N′,N′-tetramethylethylenediamine (TEMED). In some embodiments, the environmental factor is the addition of one or more denaturing agents. Non-limiting examples of denaturing agents include urea, guanidine hydrochloride, guanidine, sodium salicylate, dimethyl sulfoxide, and propylene glycol.

[0257] In some embodiments, the environmental factor is the addition of one or more enzymes. Non-limiting examples of enzymes include proteases, kinases, phosphatases, synthetases, transferases, nucleases such as restriction endonucleases, lyases, isomerases, dehydrogenases, decarboxylases, and lipases.

[0258] In some embodiments, the environmental factor is the application of electromagnetic waves. In some embodiments, the environmental factor is the application of light. In some embodiments, the electromagnetic waves have a wavelength between about 0.0001 nm and about 100 m. In some embodiments, the electromagnetic waves are selected from the group consisting of gamma rays, x-rays, ultraviolet, visible, infrared, and radio waves. In some embodiments, the electromagnetic waves are gamma rays. In some embodiments, the gamma rays have a wavelength between about 0.0001 nm and about 0.01 nm, e.g. 0.0001 nm, 0.0005 nm, 0.001 nm, 0.002 nm, 0.003 nm, 0.004 nm, 0.005 nm, 0.006 nm, 0.007 nm, 0.008 nm, 0.009 nm, and 0.01 nm. In some embodiments, the x-rays have a wavelength between about 0.01 nm and about 10 nm, e.g. about 0.01 nm, 0.02 nm, 0.03 nm, 0.04 nm, 0.05 nm, 0.06 nm, 0.07 nm, 0.08 nm, 0.09 nm, 0.10 nm, 0.2 nm, 0.3 nm, 0.4 nm, 0.5 nm, 0.6 nm, 0.7 nm, 0.8 nm, 0.9 nm, 1 nm, 2 nm, 3 nm, 4 nm, 5 nm, 6 nm, 7 nm, 8 nm, 9 nm, or about 10 nm. In some embodiments, the ultraviolet radiation has a wavelength between about 10 nm about 400 nm, e.g. about 10 nm, about 20 nm, about 30 nm, about 40 nm, about 50 nm, about 60 nm, about 70 nm, about 80 nm, about 90 nm, about 100 nm, about 150 nm, about 200 nm, about 250 nm, about 280 nm, about 300 nm, about 350 nm, or about 400 nm. In some embodiments, the visible waves have a wavelength of between about 400 nm and about 800 nm, e.g. about 400 nm, about 450 nm, about 500 nm, about 550 nm, about 600 nm, about 650 nm, about 700 nm, about 750 nm, or about 800 nm. In some embodiments, the infrared radiation has a wavelength of between about 800 nm and about 0.1 cm, e.g. about 800 nm, about 1 μm, about 2 μm, about 3 μm, about 4 μm, about 5 μm, about 6 μm, about 7 μm, about 8 μm, about 9 μm, about 10 μm, about 20 μm, about 30 μm, about 40 μm, about 50 μm, about 60 μm, about 70 μm, about 80 μm, about 90 μm, about 100 μm, about 200 μm, about 300 μm, about 400 μm, about 500 μm, about 600 μm, about 700 μm, about 800 μm, about 900 μm, or about 0.1 cm. In some embodiments, the radio waves have a wavelength of between about 0.1 cm and 100 m, e.g. about 0.1 cm, about 1 cm, about 10 cm, about 100 cm, about 1000 cm, about 2000 cm, about 3000 cm, about 4000 cm, about 5000 cm, about 6000 cm, about 7000 cm, about 8000 cm, about 9000 cm, or about 100 m.

[0259] In some embodiments, the environmental factor is the application of acoustic waves. In some embodiments, the acoustic waves have a frequency between about 1 Hz and 2000 kHz. In some embodiments, the acoustic waves have a frequency of about 1 Hz, about 5 Hz, about 10 Hz, about 20 Hz, about 30 Hz, about 40 Hz, about 50 Hz, about 60 Hz, about 70 Hz, about 80 Hz, about 90 Hz, about 100 Hz, about 200 Hz, about 300 Hz, about 400 Hz, about 500 Hz, about 600 Hz, about 700 Hz, about 800 Hz, about 900 Hz, about 1 kHz, about 100 kHz, about 200 kHz, about 300 kHz, about 400 kHz, about 500 kHz, about 600 kHz, about 700 kHz, about 800 kHz, about 900 kHz, about 1000 kHz, about 1100 kHz, about 1200 kHz, about 1300 kHz, about 1400 kHz, about 1500 kHz, about 1600 kHz, about 1700 kHz, about 1800 kHz, about 1900 kHz, or about 2000 kHz.

### EXAMPLES

### Example 1. Development of AAV-Binding Polypeptides

[0260] Site-directed mutagenesis of the wild-type AAVR ectodomain is performed. More specifically, AAV-binding polypeptides comprising an amino acid sequence are selected from any one of SEQ ID NOS: 3347, are subjected to site-directed mutagenesis of one or more amino acid residues using standard cloning techniques. The affinity of the AAV binding polypeptides is characterized. AAV-binding polypeptides that have a binding affinity for AAV of at least 50 nM or higher are selected. The ability of various environmental factors, including change in pH and addition of salt, to disrupt the AAV binding polypeptide's binding to AAV is characterized.

### Example 2. Use of a Purification Matrix Comprising an AAV-Binding Polypeptide and a Polypeptide with Phase Behavior to Purify AAV

[0261] Purification matrices comprising the AAV-binding polypeptides of Example 1 are generated and characterized. More specifically, fusion proteins comprising (i) the AAV-binding polypeptides of Example 1 and (ii) a polypeptide with phase behavior (e.g., an ELP) are expressed in Escherichia coli according to standard protocols. Isothermal titration calorimetry is utilized to characterize the affinity of the fusion protein for AAV particles. The transition temperature of the fusion protein is determined using UV-Vis spectrophotometry. The fusion proteins are then covalently coupled to a support during a linker, using standard techniques, to produce the purification matrix. The support is a bead, such as a magnetic or porous bead.

[0262] The purification matrix is then incubated with different purified AAV samples separately, including AAV1, AAV2, AAV3B, AAV5, AAV6, AAV8, and AAV9. The purification matrix forms a complex with the various AAV particles.

[0263] Various molar ratios of purification matrix to AAV particles are tested to determine an optimal ratio for purification (i.e., for complete capture of the AAV particles). An environmental factor (e.g., addition of salt such as sodium chloride or ammonium sulfate) is applied to the composition containing the purification matrix and the biologic to cause the protein-based purification matrix increase in size.

[0264] Both tangential flow filtration and centrifugation are utilized to separate the AAV particles from the protein-based purification matrix. Although both centrifugation and tangential flow filtration enable separation of the biologic from the protein-based purification matrix, tangential flow filtration is preferred because it enables the rapid purification of thousands of liters of sample volume without the requirement for specialized centrifuges.

[0265] TFF is performed using standard conditions—for example, a 1.5 bar transmembrane pressure and a 960 L/m²/h cross flow rate. Standard TFF membranes are used, such as a 0.1 μm hydrophilized poly(vinylidene difluoride) (PVDF) membrane.

[0266] The pH is adjusted (for example to an acidic pH such as 4.5) to separate (i.e. elute) the purification matrix from the AAV. The purity of the AAV is characterized by size exclusion chromatography. The protein-based purification matrix is then re-used for an additional round of purification.

### Example 3. Utilization of Purification Matrices Comprising AAV-Binding Polypeptides and a Support to Purify AAV from a Cell Lysate

[0267] AAVs are produced in a producer cell line (e.g., HEK293) according to standard protocols. The cells are lysed, and centrifuged to remove cellular debris. The cellular supernatant is contacted with one of the purification matrices of Example 2 for a period of time to allow complex formation. An environmental factor is applied to increase the size of the complexes. The purification matrix, with AAVs bound, is separated from impurities on the basis of size. The AAVs are eluted from the purification matrix by applying a second environmental factor. The AAVs are then titered and frozen at −80° C. for future use.

### Example 4. Purification of Multiple AAV Serotypes Using a Purification Matrix

[0268] Recombinant AAV particles, including AAV1, AAV2, AAV6, AAV8, and AAV9 particles, packaging a tdTomato transgene, were produced in a producer cell line (e.g., HEK293) according to standard protocols. The cells were lysed, and centrifuged to remove cellular debris. The cellular supernatant was contacted with a purification matrix having an amino acid sequence of SEQ ID NO: 171 for a period of time to allow complex formation. The purification matrix comprised an AAV binding polypeptide having an amino acid sequence of SEQ ID NO: 169 and a polypeptide with phase behavior having an amino acid sequence of SEQ ID NO: 170. An environmental factor (e.g. 0.5 M-2M NaCl, MgCl₂, or CaCl₂)) was then applied to increase the size of the complexes. The purification matrix, environmental factor, and cellular supernatant were incubated at room temperature for 15 minutes. Subsequently, the purification matrix, environmental factor, and cellular supernatant were concentrated (5-10 fold) using a 13 cm² hollow filter (0.2 μm pore size). Six wash diavolumes were performed using phosphate buffer solution and sodium chloride. This protocol allowed for separation of the purification matrix, with AAVs bound from impurities on the basis of size. The AAVs were eluted from the purification matrix by applying a buffer (e.g., the second environmental factor). The purification matrix was collected from the retentate. Various buffers were evaluated as shown in Table 5. The AAVs are then titered and frozen at −80° C. for future use.

TABLE 5
Buffers employed as the “second environmental factor”

| | Composition of Second Environmental |
|---|---|
| Environmental Factor | Factor |
| A | 0.5M Arginine (pH = 2); 0.6M NaCl |
| B | 0.1M Glycine (pH = 2); 0.6M NaCl |
| C | 0.1M Glycine (pH = 2); 0.6M MgCl₂ |
| D | 0.1M Glycine (pH = 2); 0.6M CaCl₂ |

[0269] Quantitative real-time polymerase chain reaction (qPCR) was utilized to evaluate the amount of AAV captured from solution and the amount of AAV obtained after elution. The purification matrix captured greater than 99% of AAV particles of multiple serotypes (AAV1, AAV2, AAV6, AAV8, and AAV9) (FIG. 1). Each buffer evaluated eluted over 65% of bound AAV particles in a single diavolume (FIG. 2).

[0270] The purification matrix was recycled after elution of the AAV particles to determine whether or not it could be utilized for future purifications. Recycling was performed by incubating the purification matrix at 95° C. for 5 minutes or soaking the purification matrix in 1 M NaOH or 6 M guanidine hydrochloride for five minutes.

[0271] As Table 6 shows, the purification matrix can be regenerated and utilized for repeated capture. After five cycles of purification/regeneration, the purification matrix captures 98% of AAV.

TABLE 6
Recycling of Purification Matrix

| # of times purification | Captured viral genome (vg)/ | |
|---|---|---|
| matrix has been used | milliliter (mL) | % Capture |
| 1 | 8.46 × 10¹⁰ | 97 |
| 2 | 8.60 × 10¹⁰ | 98 |
| 3 | 8.61 × 10¹⁰ | 99 |
| 4 | 8.57 × 10¹⁰ | 98 |
| 5 | 8.53 × 10¹⁰ | 98 |

[0272] Sodium dodecycl sulfate-polyacrylamide gel electrophoresis (SDS-PAGE) was utilized to evaluate the purity of the eluted AAV samples. The gels were then silver stained, to visualize any contaminants in the sample. As shown in FIG. 3, the major AAV structural proteins Vp1, Vp2, and Vp3 were visible on the gel, but no other major bands were observed. A Western Blot confirmed the presence of capsid proteins in the sample that had been eluted from the purification matrix (FIG. 4). Furthermore, after the AAV particles were captured by the purification matrix, no AAV particles remained in the capture supernatant (Capture Sup of FIG. 4). Taken together, this data indicates that, after elution from the purification matrix, substantially all contaminants have been removed from the sample, and the isolated AAV has a high degree of purity.

[0273] In a subsequent experiment, it was evaluated whether the purification matrix is able to capture full capsids, empty capsids, or both. Total number of AAV capsids present in samples eluted from the purification matrix was estimated using an ELISA-based assay. The eluted samples were also evaluated using qPCR, to determine the number of viral genomes. A qPCR:ELISA value was used to approximate the ratio of full capsids relative to total capsids. As shown in Table 7, the purification matrix enriched for full capsids.

TABLE 7
Enrichment for Full AAV Capsid

| | | | Elution | Change in |
|---|---|---|---|---|
| Method | Starting Quantity | Capture % | Quantity | Full % |
| qPCR | 5.78 × 10¹⁰ | 99.2 | 5.73 × 10¹⁰ | 33% → 70% |
| ELISA | 1.76 × 10¹¹ | 99.9 | 8.14 × 10¹⁰ | |

[0274] The eluted AAV samples were also assayed to determine whether they maintained infectivity after purification. AAV8 carrying a tdTomato transgene was administered to HEK293 cells (10,000 cells/well) in culture at a multiplicity of infection (MOI) 1×10⁶ or 1×10⁷. After 48 of incubation, the cells were visualized for tdTomato fluorescence using fluorescence microscopy. As shown in FIG. 5A, AAV purified by the purification matrix (ViraTag™) infected cells to a similar extent as AAVs purified according to standard protocols (Pos Ctrl). This data was quantified, as shown in FIG. 5B. There was no statistically significant difference between infectivity levels of the AAV8 purified by standard protocols (Pos Ctrl) and the AAV8 purified by the purification matrix (ViraTag™). Accordingly, this data shows that AAV particles purified using the tested purification matrix (ViraTag™) retain high levels of infectivity.

### Example 5. Purification of AAV9 Using a Purification Matrix and Tangential Flow Filtration (TFF)

[0275] HEK293 cells producing a recombinant AAV9 vector packaging a tdTomato transgene were grown in suspension and harvested by centrifugation. 200 mL of the supernatant were treated with 10 U/mL benzonase and 0.01% pluronic acid and sterile filtered through a 0.2-micron bottle-top filter. This starting material (SM) was then mixed with 1 μM of the purification matrix of Example 4 and 0.6 M NaCl salt (i.e., the first environmental factor) to form an AAV-purification matrix complex.

[0276] This SM was processed in continuous fed-batch mode using a Repligen KR2i tangential-flow filtration (TFF) unit. The TFF was setup with a 20 mL retentate vessel, prepared with 50 μM purification matrix and 0.6 M NaCl, as well as a 13 cm² hollow fiber filter with 0.2-micron pores. A concentration-diafilter (CD) mode (10×concentration factor (CF), 6×diavolumes (DV) was run in permeate control with the SM and permeate pump set to equal flow rates. Once the entire 200 mL SM feed was processed, the retained material was rinsed with 6 DV of wash buffer (20 mM Tris, 0.5M NaCl). The AAV9 material, now free of contaminants, was then resolubilized on ice and mixed with an equal volume of 2×Elution buffer (i.e., a second environmental factor) with the permeate valve closed. The elution buffer contained 100 mM glycine at pH 3 and 0.6 M NaCl. After 20 minutes, the recirculating sample was warmed back to room temperature and phase separated with NaCl. The permeate valve was opened and pure AAV9 was collected in a second CD mode (2×CF, 4×DV) with elution buffer diavolumes (100 mM glycine, pH 3, 0.6M NaCl). The flux and transmembrane pressure (TMP) were tracked throughout the run (FIG. 6), demonstrating a stable, efficient, and scalable process. Permeate and retentate samples were collected throughout the run for analysis of AAV loss by anti-AAV Western Blot (FIG. 7), as well as purity by host cell protein (HCP) quantification using a HEK HCP ELISA (Cygnus®) and dsDNA quantification using a Quant-iT™ Picogreen Assay® (Thermo Fisher®). The process enabled removal of HCPs by 2-3 log (FIG. 8) and of double stranded DNA (dsDNA) by >3 log (FIG. 9).

### Example 6. Effect of Titer, Clarification, and Nuclease Treatment on AAV Purification

[0277] The ability of the purification matrix of Example 4 to capture AAV8 particles from cell lysate or the media of suspension cultures of HEK293 cells producing AAV8 particles (referred to in FIG. 10 as “supernatant”). The cell lysate was produced by resuspending pelleted HEK293 cells producing AAV8 particles in 0.5% Triton-X-100.

[0278] The cell lysate and media evaluated contained titers of AAV particles that ranged from 1×10⁸ to 1×10⁷ viral particles per microliter (vp/μL). The ability of purification matrix to capture AAV8 particles from cell lysate treated with nuclease was also evaluated. Cell lysates that were treated with nuclease were incubated for 1 hr at 34° C. with 50 U/mL benzonase (Millipore®).

[0279] The ability of purification matrix to capture AAV8 particles from clarified cell lysate or media was also evaluated. Cell lysates and/or media were clarified by centrifugation at 13,200 rpm for 10 minutes. The supernatant was used for subsequent isolation of the AAV8 particles. for 10 min at 13,200 rpm.

[0280] AAV8 particles were isolated from each sample by mixing the sample with 10 μM purification matrix and 0.6 M NaCl (i.e., a first environmental factor) and centrifuging the sample at 13,200 rpm for 10 minutes.

[0281] The pellets containing AAV-purification matrix complex were resuspended on ice in an elution buffer (i.e., second environmental factor) comprising 100 mM glycine at pH 3, warmed to room temperature, transitioned with 0.6 M salt, and then centrifuged a second time. The amount of eluted AAV8 was compared to that in the starting material, (i.e the media or cell lysate comprising AAV8 particles) using inverted terminal repeat (ITR) quantitative polymerase chain reaction (qPCR). This technique quantitates the number of AAV particles by measuring the number of ITRs using PCR. The AAV Capture Efficiency for each sample was calculated using the following equation: 100×(# of AAV8 particles captured by the purification matrix/# of AAV8 particles in the composition before purification).

[0282] The purification matrix robustly captured >98% AAV particles regardless of titer (1×10⁷ to 4×10¹⁰), clarification, nuclease treatment, or lysate versus media as the starting material (FIG. 10). Evaluation of lysate samples with and without nuclease treatment showed that nuclease treatment did not impact final eluted AAV8 particle purity when compared by silver stain SDS-PAGE (FIG. 11) and Quant-iT™ picogreen assay for dsDNA (FIG. 12).

### Example 7. Effect of Centrifugation Speed on AAV8 Capture

[0283] Harvested media from AAV8 HEK293 suspension cell culture was mixed with 10 μM Purification Matrix and 0.6 M NaCl to form an AAV-purification matrix complex. The samples were centrifuged for 10 min at relative centrifugal forces (RCF) ranging from 100 to 16,000. For each RCF, uncaptured AAV8 remaining in the supernatant was quantified using ITR qPCR and calculated as a percentage of the amount measured in the starting harvest material. The AAV Capture Efficiency was measured as 100% less the percentage remaining uncaptured in the supernatant and results showed that speeds of 500 RCF or higher yielded highly efficient AAV8 capture (FIG. 13).

### Example 8. Stabilization of AAV2 by Purification Matrix

[0284] Adherent HEK293 cells were transfected according to a standard triple transfection method, and used to produce recombinant AAV2 particles carrying a luciferase transgene. The cells were cultured for 6 days, in the presence or absence of purification matrix. Cells cultured in the presence of 10 μM of the purification matrix of Example 4 were compared to control cells, with each group, treatment or control, in triplicate. The culture media was collected on day 4 and replaced with an equal volume of media with or without the purification matrix additive. On day 6, the media was collected again and the cells were rinsed with PBS and harvested by scraping. The total vector genomes collected in all fractions were quantified for comparison using qPCR using primers against ITR2. Inclusion of the purification matrix in the culture media increased vector genome (vg) titers by at least 8% (FIG. 14).

### Example 9. Stabilization of AAV8 by Purification Matrix

[0285] Media was harvested from HEK293 cells grown in suspension, wherein the cells were producing GFP-AAV8. The media was aliquoted and stored at −20° C. either with or without the addition of 100 μM of the purification matrix of Example 4. As an accelerated stability study, the samples were subjected to freeze-thaw cycles (−20° C. to room temperature) and then assayed using a AAV8 ELISA (Progen), which quantifies total intact AAV particles. The quantified particles for the control and purification matrix-treated samples were normalized to the starting materials with no freeze-thaws. This data indicates that the purification matrix may enhance the resistance of AAV particles to freeze-thaw-mediated degradation and aggregation (FIG. 15).

### Example 10. Capture of AAV8 Particles with a Purification Matrix

[0286] Media was harvested from HEK293 suspension cells producing AAV8 particles carrying a luciferase (luc) transgene. The media was contacted with 0 μM, 0.1 μM, 0.5 μM, 1 μM, 10 μM, and 50 μM of the purification matrix of Example 4, resulting in the formation of complexes between AAV8 particles and purification matrix. A first environmental factor (i.e. 0.6 M NaCl) was applied to increase the size of the complexes. Subsequently, the media containing the complexes was centrifuged at 13,200 revolutions per minute (rpm) for 10 minutes (min). This protocol allowed for separation of the complexes from impurities on the basis of size. Inverted terminal repeat (ITR) quantitative polymerase chain reaction (qPCR) was utilized to evaluate the amount of AAV particles captured from the media using the purification matrix compared to the amount of AAV particles in the starting material. This technique quantitates the number of AAV particles by measuring the number of ITRs using PCR. The Capture Efficiency of the purification matrix at each concentration was calculated using the following equation: 100×(# of AAV8 particles captured by the purification matrix/# of AAV8 particles in the composition before purification). FIG. 16 shows that purification matrix concentrations at or above 10 μM are sufficient for robust, >98%, virus capture.

### NUMBERED EMBODIMENTS OF THE DISCLOSURE

[0287] Notwithstanding the appended claims, the disclosure sets forth the following numbered embodiments:
[0288] 1. A purification matrix comprising an AAV-binding polypeptide coupled to a support, wherein the AAV-binding polypeptide comprises the ectodomain of the AAV receptor (AAVR), or an AAV-binding fragment or derivative thereof.
[0289] 2. The purification matrix of embodiment 1, wherein the AAVR is a human AAVR.
[0290] 3. The purification matrix of embodiment 1, wherein the AAVR is a monkey AAVR
[0291] 4. The purification matrix of embodiment 1, wherein the AAVR is an orangutan AAVR.
[0292] 5. The purification matrix of embodiment 1, wherein the AAVR is a mouse AAVR.
[0293] 6. The purification matrix of any one of embodiments 1-5, wherein the AAVR is a wildtype AAVR
[0294] 7. The purification matrix of any one of embodiments 1-5, wherein the AAVR is a mutant AAVR
[0295] 8. The purification matrix of embodiment 1, wherein the AAV-binding polypeptide comprises the sequence of SEQ ID NO: 33.
[0296] 9. The purification matrix of embodiment 1, wherein the AAV-binding polypeptide comprises the sequence of SEQ ID NO: 33 with up to 25 amino acid mutations.
[0297] 10. The purification matrix of embodiment 1, wherein the AAV-binding domain comprises amino acids 411 to 499 of SEQ ID NO: 35 with at least one, at least two, at least three, at least four, or at least five mutations, wherein each mutation is individually selected from the group consisting of V440H, S431H, Q432H, T434H, Y442H, I462H, D435H, D436H, K438H, and 1439H.
[0298] 11. The purification matrix of embodiment 1, wherein the AAV-binding polypeptide comprises any one of SEQ ID NOs: 28-32, 37-41, 43-47, and 52-86.
[0299] 12. The purification matrix of embodiment 1, wherein the AAV-binding polypeptide comprises at least two, at least three, at least four, or at least five of SEQ ID NOs: 28-32, 37-41, 43-47, and 52-86.
[0300] 13. The purification matrix of embodiment 1, wherein the AAV-binding polypeptide comprises a polycystic kidney disease 1 (PKD1) domain, or a fragment thereof.
[0301] 14. The purification matrix of embodiment 1, wherein the AAV-binding polypeptide comprises a polycystic kidney disease 2 (PKD2) domain, or a fragment thereof.
[0302] 15. The purification matrix of embodiment 1, wherein the AAV-binding polypeptide comprises a polycystic kidney disease 3 (PKD3) domain, or a fragment thereof.
[0303] 16. The purification matrix of embodiment 1, wherein the AAV-binding polypeptide comprises a polycystic kidney disease 4 (PKD4) domain, or a fragment thereof.
[0304] 17. The purification matrix of embodiment 1, wherein the AAV-binding polypeptide comprises a polycystic kidney disease 5 (PKD5) domain, or a fragment thereof.
[0305] 18. The purification matrix of embodiment 1, wherein the AAV-binding polypeptide comprises a sequence of SEQ ID NO: 29.
[0306] 19. The purification matrix of embodiment 18, wherein the AAV-binding polypeptide comprises a sequence of SEQ ID NO: 29 wherein at least one amino acid is mutated to histidine.
[0307] 20. The purification matrix of any one of embodiments 1-19, wherein the support is a bead, a resin, a membrane, a fiber, a polymer, a plate, or a chip.
[0308] 21. The purification matrix of embodiment 20, wherein the support is a bead comprising sepharose, agarose, cellulose, polystyrene, polymethacrylate, and/or polyacrylamide.
[0309] 22. The purification matrix of embodiment 20, wherein the support is a magnetic bead.
[0310] 23. The purification matrix of embodiment 20, wherein the support is a polymer.
[0311] 24. The purification matrix of embodiment 23, wherein the support is a synthetic polymer.
[0312] 25. The purification matrix of any one of embodiments 1-24, wherein the AAV binding polypeptide is reversibly coupled to the support.
[0313] 26. The purification matrix of any one of embodiments 1-24, wherein the AAV binding polypeptide is covalently coupled to the support.
[0314] 27. The purification matrix of any one of embodiments 1-24, wherein the AAV binding polypeptide is non-covalently coupled to the support.
[0315] 28. The purification matrix of any one of embodiments 1-27, wherein the AAV binding polypeptide is coupled to the support via a linker.
[0316] 29. The purification matrix of embodiment 28, wherein the linker is a peptide linker.
[0317] 30. The purification matrix of embodiment 29, wherein the peptide linker comprises a protease cleavage site.
[0318] 31. The purification matrix of embodiment 28, wherein the linker is a chemical linker.
[0319] 32. The purification matrix of any one of embodiments 1 to 31, wherein the purification matrix is reusable.
[0320] 33. The purification matrix of any one of embodiments 1 to 31, wherein the purification matrix comprises an AAV binding polypeptide having the amino acid sequence of SEQ ID NO: 9.
[0321] 34. The purification matrix of any one of embodiments 1 to 31, wherein the purification matrix comprises an AAV binding polypeptide having the amino acid sequence of SEQ ID NO: 52.
[0322] 35. The purification matrix of any one of embodiments 1 to 31, wherein the purification matrix comprises an AAV binding polypeptide having the amino acid sequence of SEQ ID NO: 64.
[0323] 36. A purification matrix comprising an AAV-binding polypeptide coupled to a polypeptide having phase behavior, wherein the AAV-binding polypeptide comprises the ectodomain of the AAV receptor (AAVR), or an AAV-binding fragment or derivative thereof.
[0324] 37. The purification matrix of embodiment 36, wherein the AAVR is a human AAVR.
[0325] 38. The purification matrix of embodiment 36, wherein the AAVR is a monkey AAVR.
[0326] 39. The purification matrix of embodiment 36, wherein the AAVR is an orangutan AAVR.
[0327] 40. The purification matrix of embodiment 36, wherein the AAVR is a mouse AAVR.
[0328] 41. The purification matrix of any one of embodiments 36-40, wherein the AAVR is a wildtype AAVR.
[0329] 42. The purification matrix of any one of embodiments 36-40, wherein the AAVR is a mutant AAVR
[0330] 43. The purification matrix of embodiment 36, wherein the AAV-binding polypeptide comprises the sequence of SEQ ID NO: 33.
[0331] 44. The purification matrix of embodiment 36, wherein the AAV-binding polypeptide comprises the sequence of SEQ TD NO: 33 with up to 25 amino acid mutations.
[0332] 45. The purification matrix of embodiment 36, wherein the AAV-binding domain comprises amino acids 411 to 499 of SEQ ID NO: 35 with at least one, at least two, at least three, at least four, or at least five mutations, wherein each mutation is individually selected from the group consisting of V440H, S431H, Q432H, T434H, Y442H, I462H, D435H, D436H, K438H, and 1439H.
[0333] 46. The purification matrix of embodiment 36, wherein the AAV-binding polypeptide comprises any one of SEQ ID NOs: 28-32, 37-41, 43-47, and 52-86.
[0334] 47. The purification matrix of embodiment 36, wherein the AAV-binding polypeptide comprises at least two, at least three, at least four, or at least five of SEQ ID NOs: 28-32, 37-41, 43-47, and 52-86.
[0335] 48. The purification matrix of embodiment 36, wherein the AAV-binding polypeptide comprises a polycystic kidney disease 1 (PKD1) domain, or a fragment thereof.
[0336] 49. The purification matrix of embodiment 36, wherein the AAV-binding polypeptide comprises a polycystic kidney disease 2 (PKD2) domain, or a fragment thereof.
[0337] 50. The purification matrix of embodiment 36, wherein the AAV-binding polypeptide comprises a polycystic kidney disease 3 (PKD3) domain, or a fragment thereof.
[0338] 51. The purification matrix of embodiment 36, wherein the AAV-binding polypeptide comprises a polycystic kidney disease 4 (PKD4) domain, or a fragment thereof.
[0339] 52. The purification matrix of embodiment 36, wherein the AAV-binding polypeptide comprises a polycystic kidney disease 5 (PKD5) domain, or a fragment thereof.
[0340] 53. The purification matrix of embodiment 36, wherein the AAV-binding polypeptide comprises a sequence of SEQ ID NO: 29.
[0341] 54. The purification matrix of embodiment 53, wherein the AAV-binding polypeptide comprises a sequence of SEQ ID NO: 29 wherein at least one amino acid is mutated to histidine.
[0342] 55. The purification matrix of any one of embodiments 36-54, wherein the AAV binding polypeptide is reversibly coupled to the polypeptide having phase behavior.
[0343] 56. The purification matrix of any one of embodiments 36-54, wherein the AAV binding polypeptide is covalently coupled to the polypeptide having phase behavior.
[0344] 57. The purification matrix of any one of embodiments 36-54, wherein the AAV binding polypeptide is non-covalently coupled to the polypeptide having phase behavior.
[0345] 58. The purification matrix of any one of embodiments 36-57, wherein the AAV binding polypeptide is coupled to the polypeptide having phase behavior via a linker.
[0346] 59. The purification matrix of embodiment 58, wherein the linker is a peptide linker.
[0347] 60. The purification matrix of embodiment 58, wherein the peptide linker comprises a protease cleavage site.
[0348] 61. The purification matrix of embodiment 58, wherein the linker is a chemical linker.
[0349] 62. The purification matrix of any one of embodiments 36-61, wherein a fusion protein comprises the AAV binding polypeptide and the polypeptide having phase behavior.
[0350] 63. The purification matrix of any one of embodiments 36-62, wherein the polypeptide with phase behavior is an elastin-like polypeptide.
[0351] 64. The purification matrix of any one of embodiments 36-62, wherein the polypeptide with phase behavior is a resilin-like polypeptide.
[0352] 65. The purification matrix of embodiment 63, wherein the polypeptide with phase behavior is a polymer comprising a pentapeptide repeat having the sequence (Val-Pro-Gly-Xaa-Gly)ₙ (SEQ ID NO: 10), or a randomized, scrambled analog thereof; wherein Xaa can be any amino acid except proline.
[0353] 66. The purification matrix of embodiment 65, wherein n is an integer between 1 and 360, inclusive of endpoints.
[0354] 67. The purification matrix of any one of embodiments 1-63, wherein the polypeptide with phase behavior comprises an amino acid sequence selected from:

a.
(SEQ ID NO: 1)
(GRGDSPY)ₙ
b.
(SEQ ID NO: 2)
(GRGDSPH)ₙ
c.
(SEQ ID NO: 3)
(GRGDSPV)ₙ
d.
(SEQ ID NO: 4)
(GRGDSPYG)ₙ
e.
(SEQ ID NO: 5)
(RPLGYDS)ₙ
(f.
(SEQ ID NO: 6)
(RPAGYDS)ₙ
(g.
(SEQ ID NO: 7)
(GRGDSYP)ₙ
(h.
(SEQ ID NO: 8)
(GRGDSPYQ)ₙ
i.
(SEQ ID NO: 9)
(GRGNSPYG)ₙ
j.
(SEQ ID NO: 11)
(GVGVP)ₙ;
k.
(SEQ ID NO: 12)
(GVGVPGLGVPGVGVPGLGVPGVGVP)ₘ;
l.
(SEQ ID NO: 13)
(GVGVPGVGVPGAGVPGVGVPGVGVP)ₘ;
m.
(SEQ ID NO: 14)
(GVGVPGWGVPGVGVPGWGVPGVGVP)ₘ;
n.
(SEQ ID NO: 15)
(GVGVPGVGVPGVGVPGVGVPGVGVPGVGVPGEGVPGFGVPGVGVP)ₘ;
o.
(SEQ ID NO: 16)
(GVGVPGVGVPGVGVPGVGVPGVGVPGVGVPGKGVPGFGVPGVGVP)ₘ;
and
p.
(SEQ ID NO: 17)
(GAGVPGVGVPGAGVPGVGVPGAGVP)ₘ;

or a randomized, scrambled analog thereof;
[0355] wherein:
[0356] n is an integer in the range of 20-360; and
[0357] m is an integer in the range of 4-25.
[0358] 68. The purification matrix of any one of embodiments 1-63, wherein the polypeptide with phase behavior comprises an amino acid sequence selected from:

(a)
(SEQ ID NO: 143)
(GVGVP)ₘ;
(b)
(SEQ ID NO: 148)
(ZZPXXXXGZ)ₘ;
(c)
(SEQ ID NO: 149)
(ZZPXGZ)ₘ;
(d)
(SEQ ID NO: 150)
(ZZPXXGZ)ₘ;
or
(e)
(SEQ ID NO: 151)
(ZZPXXXGZ)ₘ,

wherein m is an integer between 10 and 160, inclusive of endpoints, wherein X if present is any amino acid except proline or glycine, and wherein Z if present is any amino acid.
[0359] 69. The purification matrix of any one of embodiments 1-63, wherein the polypeptide with phase behavior comprises an amino acid sequence selected from:

(a)
(SEQ ID NO: 144)
(GVGVPGVGVPGAGVPGVGVPGVGVP)ₘ;
or
(b)
(SEQ ID NO: 146)
(GVGVPGVGVPGLGVPGVGVPGVGVP)ₘ;

wherein m is an integer between 2 and 32, inclusive of endpoints.
[0360] 70. The purification matrix of any one of embodiments 1-63, wherein the polypeptide with phase behavior comprises an amino acid sequence selected from:
   [0361] (a) (GVGVPGVGVPGAGVPGVGVPGVGVP)ₘ, (SEQ ID NO: 144), wherein m is 8 or 16;
   [0362] (b) (GVGVPGAGVP)ₘ (SEQ ID NO: 145), wherein m is an integer between 5 and 80, inclusive of endpoints; or
   [0363] (c) (GXGVP)ₘ(SEQ ID NO: 147), wherein m is an integer between 10 and 160, inclusive of endpoints, and wherein X for each repeat is independently selected from the group consisting of glycine, alanine, valine, isoleucine, leucine, phenylalanine, tyrosine, tryptophan, lysine, arginine, aspartic acid, glutamic acid, and serine.
[0364] 71. The purification matrix of any one of embodiments 36 to 70, wherein the purification matrix is reusable.
[0365] 72. The purification matrix of any one of embodiments 36 to 70, wherein the purification matrix comprises an AAV binding polypeptide having the amino acid sequence of SEQ ID NO: 29.
[0366] 73. The purification matrix of any one of embodiments 36 to 70, wherein the purification matrix comprises an AAV binding polypeptide having the amino acid sequence of SEQ ID NO: 52.
[0367] 74. The purification matrix of any one of embodiments 36 to 70, wherein the purification matrix comprises an AAV binding polypeptide having the amino acid sequence of SEQ ID NO: 64.
[0368] 75. The purification matrix of any one of embodiments 36 to 70, wherein the purification matrix comprises an AAV binding polypeptide having the amino acid sequence of SEQ ID NO: 29 and a polypeptide with phase behavior comprising the amino acid sequence of SEQ ID NO: 88 or (GVGVPGLGVPGVGVPGLGVPGVGVP)ₘ (SEQ ID NO: 12), wherein m is 16.
[0369] 76. The purification matrix of any one of embodiments 36 to 70, wherein the purification matrix comprises an AAV binding polypeptide having the amino acid sequence of SEQ ID NO: 52 and a polypeptide with phase behavior comprising the amino acid sequence of SEQ ID NO: 88 or (GVGVPGLGVPGVGVPGLGVPGVGVP)ₘ(SEQ ID NO: 12), wherein m is 16.
[0370] 77. The purification matrix of any one of embodiments 36 to 70, wherein the purification matrix comprises an AAV binding polypeptide having the amino acid sequence of SEQ ID NO: 64 and a polypeptide with phase behavior comprising the amino acid sequence of SEQ ID NO: 88 or (GVGVPGLGVPGVGVPGLGVPGVGVP)ₘ(SEQ ID NO: 12), wherein m is 16.
[0371] 78. The purification matrix of any one of embodiments 36 to 70, wherein the purification matrix comprises an amino acid sequence of any one of SEQ ID NOs: 87 and 171-174.
[0372] 79. A method for purifying an AAV, the method comprising contacting the AAV with the purification matrix of any one of embodiments 1-35.
[0373] 80. The method of embodiment 79, wherein the AAV comprises a wildtype AAV capsid.
[0374] 81. The method of embodiment 79, wherein the AAV comprises a mutant AAV capsid.
[0375] 82. The method of embodiment 79, wherein the AAV comprises a capsid of any one of the following serotypes: AAV1, AAV2, AAV3, AAV4, AAV5, AAV6, AAV7, AAV8, AAV9, AAV10, AAV11, AAV12, AAVrh8, AAVrh10, or AAVrh74.
[0376] 83. The method of any one of embodiments 79-82, wherein the AAV reversibly binds to the purification matrix to form an AAV-purification matrix complex.
[0377] 84. The method of embodiment 83, wherein the method comprises separating the AAV-purification matrix complex from one or more impurities.
[0378] 85. The method of embodiment 84, wherein the AAV-purification matrix complex is separated from the one or more impurities by washing the AAV-purification matrix complex.
[0379] 86. The method of any one of embodiments 83-85, wherein the method comprises eluting the AAV from the AAV-purification matrix complex.
[0380] 87. The method of embodiment 86, wherein the AAV is eluted from the AAV-purification matrix complex by changing the pH of a composition comprising the AAV-purification matrix complex.
[0381] 88. The method of embodiment 86, wherein the AAV is eluted from the AAV-purification matrix complex by changing the temperature of a composition comprising the AAV-purification matrix complex.
[0382] 89. The method of embodiment 86, wherein the AAV is eluted from the AAV-purification matrix complex by changing the ionic strength of a composition comprising the AAV-purification matrix complex.
[0383] 90. The method of embodiment 86, wherein the AAV is eluted from the AAV-purification matrix complex by the addition of a reducing agent to a composition comprising the AAV-purification matrix complex.
[0384] 91. A method for purifying an AAV, the method comprising contacting the AAV with the purification matrix of any one of embodiments 36-78.
[0385] 92. The method of embodiment 91, wherein the AAV comprises a wildtype AAV capsid.
[0386] 93. The method of embodiment 91, wherein the AAV comprises a mutant AAV capsid.
[0387] 94. The method of embodiment 91, wherein the AAV comprises a capsid of any one of the following serotypes: AAV1, AAV2, AAV3, AAV4, AAV5, AAV6, AAV7, AAV8, AAV9, AAV10, AAV11, AAV12, AAVrh8, AAVrh10, AAVrh32.33, AAVrh74, Avian AAV or Bovine AAV.
[0388] 95. The method of any one of embodiments 91-94, wherein the AAV reversibly binds to the purification matrix to form an AAV-purification matrix complex.
[0389] 96. The method of embodiment 95, wherein the method comprises using a first environmental factor to increase the size of the AAV-purification matrix complex.
[0390] 97. The method of embodiment 96, wherein the first environmental factor comprises one or more of:
   [0391] a. a change in one or more of temperature, pH, salt concentration or pressure;
   [0392] b. the addition of one or more surfactants, cofactors, vitamins, molecular crowding agents, enzymes, denaturing agents; or
   [0393] c. the application of electromagnetic or acoustic waves.
[0394] 98. The method of embodiment 96 or 97, wherein the method comprises separating the AAV-purification matrix complex from at least one impurity on the basis of size.
[0395] 99. The method of embodiment 98, wherein the AAV-purification matrix complex is separated from at least one impurity on the basis of diameter.
[0396] 100. The method of embodiment 98, wherein the AAV-purification matrix complex is separated from at least one impurity on the basis of mass.
[0397] 101. The method of any one of embodiments 98-100, wherein the separation on the basis of size is performed using tangential flow filtration, analytical ultracentrifugation, membrane chromatography, high performance liquid chromatography, normal flow filtration, acoustic wave separation, centrifugation, counterflow centrifugation, and fast protein liquid chromatography.
[0398] 102. The method of any one of embodiments 91-101, wherein a second environmental factor is used to elute the AAV from the AAV-purification matrix complex.
[0399] 103. The method of embodiment 102, wherein the second environmental factor comprises one or more of:
   [0400] a. a change in one or more of temperature, pH, salt concentration or pressure;
   [0401] b. the addition of one or more surfactants, cofactors, vitamins, molecular crowding agents, denaturing agents, enzymes; or
   [0402] c. the application of electromagnetic or acoustic waves.
[0403] 104. The method of any one of embodiments 79-103, comprising regenerating the purification matrix and reusing the purification matrix to purify a second AAV.
[0404] 105. The method of any one of embodiments 79-103, wherein the purified AAV has a level of infectivity that is greater than 95% of the level of infectivity before purification.
[0405] 106. The method of any one of embodiments 79-103, wherein the AAV retains at least 96% of its infectivity after purification.
[0406] 107. The method of any one of embodiments 79-103, wherein the AAV retains at least 97% of its infectivity after purification.
[0407] 108. The method of any one of embodiments 79-103, wherein the AAV retains at least 98% of its infectivity after purification.
[0408] 109. The method of any one of embodiments 79-103, wherein the AAV retains at least 99% of its infectivity after purification.
[0409] 110. The method of any one of embodiments 79-103, wherein the AAV retains at least 100% of its infectivity after purification.
[0410] 111. The method of any one of embodiments 79-103, wherein the purified AAV is enriched for full capsids.
[0411] 112. The method of embodiment 111, wherein the purified AAV has an increased qPCR: ELISA ratio as compared to the qPCR:ELISA ratio before purification.
[0412] 113. The method of any one of embodiments 79-112, wherein the method is completed in about 2 to about 10 hours.
[0413] 114. The method of embodiment 113, wherein the method is completed in about 4 to about 8 hours.
[0414] 115. A composition comprising an AAV purified according to the method of any one of embodiments 79-114.
[0415] 116. The composition of embodiment 115, wherein the composition is at least 70%, at least 80%, at least 85%, at least 90%, at least 95%, at least 96%, at least 97%, at least 98%, or at least 99% free of impurities.
[0416] 117. An AAV binding polypeptide comprising the sequence of any one of SEQ ID NOS: 28-47 with at least one mutation.
[0417] 118. A nucleic acid encoding the AAV binding polypeptide of embodiment 117.
[0418] 119. A vector comprising the nucleic acid of embodiment 118.
[0419] 120. A composition comprising the AAV binding polypeptide of embodiment 117, the nucleic acid of embodiment 118, or the vector of embodiment 119.
[0420] 121. A kit comprising the AAV binding polypeptide of embodiment 117, the nucleic acid of embodiment 118, or the vector of embodiment 119.
[0421] 122. A method of increasing yield of AAV particles during production thereof, the method comprising culturing AAV-producing cells in the presence of a purification matrix.
[0422] 123. A method of stabilizing AAV particles during production thereof, the method comprising culturing AAV-producing cells in the presence of a purification matrix.
[0423] 124. A method of stabilizing AAV particles during purification thereof, the method comprising contacting the AAV particles with a purification matrix during purification thereof.
[0424] 125. A method of stabilizing AAV particles during storage thereof, the method comprising storing the AAV particles in the presence of a purification matrix.
[0425] 126. A method of increasing the shelf-life of AAV particles, the method comprising storing the AAV particles in the presence of a purification matrix.
[0426] 127. The method of any one of embodiments 122-126, wherein the purification matrix is the purification matrix of any one of embodiments 1-78.
[0427] 128. The method of any one of embodiments 122-127, wherein the AAV particles are wildtype AAV particles of any one of the following serotypes: AAV1, AAV2, AAV3, AAV4, AAV5, AAV6, AAV7, AAV8, AAV9, AAV10, AAV11, AAV12, AAVrh8, AAVrh10, AAVrh32.33, AAVrh74, Avian AAV or Bovine AAV.
[0428] 129. The method of any one of embodiments 122-127, wherein the AAV particles are mutant AAV particles.
[0429] 130. The method of any one of embodiments 122-127, wherein the AAV particles reversibly bind to the purification matrix to form an AAV-purification matrix complex.
[0430] 131. The method of any one of embodiments 122-127, wherein the purification matrix is present at a concentration of at least about 10 μM.

### INCORPORATION BY REFERENCE

[0431] All references, articles, publications, patents, patent publications, and patent applications cited herein are incorporated by reference in their entireties for all purposes. However, mention of any reference, article, publication, patent, patent publication, and patent application cited herein is not, and should not be taken as, an acknowledgment or any form of suggestion that it constitutes valid prior art or form part of the common general knowledge in any country in the world.

The application's sequence listing, which the Patent Office published only in electronic form, follows.

SEQUENCE LISTING (174 sequences)

SEQ ID NO: 1 - protein, 3500 aa, Artificial Sequence
  resilin-like polypeptide
  SITE (8)..(3500): May be present or absent in groups of the repeat unit Gly Arg Gly Asp Ser Pro Tyr
GRGDSPYGRGDSPYGRGDSPYGRGDSPYGRGDSPYGRGDSPYGRGDSPYGRGDSPYGRGDSPYGRGDSPYGRGDSPYGRGDSPYGRGDSPYGRGDSPYGRGDSPYGRGDSPYGRGDSPYGRGDSPYGRGDSPYGRGDSPYGRGDSPYGRGDSPYGRGDSPYGRGDSPYGRGDSPYGRGDSPYGRGDSPYGRGDSPYGRGDSPYGRGDSPYGRGDSPYGRGDSPYGRGDSPYGRGDSPYGRGDSPYGRGDSPYGRGDSPYGRGDSPYGRGDSPYGRGDSPYGRGDSPYGRGDSPYGRGDSPYGRGDSPYGRGDSPYGRGDSPYGRGDSPYGRGDSPYGRGDSPYGRGDSPYGRGDSPYGRGDSPYGRGDSPYGRGDSPYGRGDSPYGRGDSPYGRGDSPYGRGDSPYGRGDSPYGRGDSPYGRGDSPYGRGDSPYGRGDSPYGRGDSPYGRGDSPYGRGDSPYGRGDSPYGRGDSPYGRGDSPYGRGDSPYGRGDSPYGRGDSPYGRGDSPYGRGDSPYGRGDSPYGRGDSPYGRGDSPYGRGDSPYGRGDSPYGRGDSPYGRGDSPYGRGDSPYGRGDSPYGRGDSPYGRGDSPYGRGDSPYGRGDSPYGRGDSPYGRGDSPYGRGDSPYGRGDSPYGRGDSPYGRGDSPYGRGDSPYGRGDSPYGRGDSPYGRGDSPYGRGDSPYGRGDSPYGRGDSPYGRGDSPYGRGDSPYGRGDSPYGRGDSPYGRGDSPYGRGDSPYGRGDSPYGRGDSPYGRGDSPYGRGDSPYGRGDSPYGRGDSPYGRGDSPYGRGDSPYGRGDSPYGRGDSPYGRGDSPYGRGDSPYGRGDSPYGRGDSPYGRGDSPYGRGDSPYGRGDSPYGRGDSPYGRGDSPYGRGDSPYGRGDSPYGRGDSPYGRGDSPYGRGDSPYGRGDSPYGRGDSPYGRGDSPYGRGDSPYGRGDSPYGRGDSPYGRGDSPYGRGDSPYGRGDSPYGRGDSPYGRGDSPYGRGDSPYGRGDSPYGRGDSPYGRGDSPYGRGDSPYGRGDSPYGRGDSPYGRGDSPYGRGDSPYGRGDSPYGRGDSPYGRGDSPYGRGDSPYGRGDSPYGRGDSPYGRGDSPYGRGDSPYGRGDSPYGRGDSPYGRGDSPYGRGDSPYGRGDSPYGRGDSPYGRGDSPYGRGDSPYGRGDSPYGRGDSPYGRGDSPYGRGDSPYGRGDSPYGRGDSPYGRGDSPYGRGDSPYGRGDSPYGRGDSPYGRGDSPYGRGDSPYGRGDSPYGRGDSPYGRGDSPYGRGDSPYGRGDSPYGRGDSPYGRGDSPYGRGDSPYGRGDSPYGRGDSPYGRGDSPYGRGDSPYGRGDSPYGRGDSPYGRGDSPYGRGDSPYGRGDSPYGRGDSPYGRGDSPYGRGDSPYGRGDSPYGRGDSPYGRGDSPYGRGDSPYGRGDSPYGRGDSPYGRGDSPYGRGDSPYGRGDSPYGRGDSPYGRGDSPYGRGDSPYGRGDSPYGRGDSPYGRGDSPYGRGDSPYGRGDSPYGRGDSPYGRGDSPYGRGDSPYGRGDSPYGRGDSPYGRGDSPYGRGDSPYGRGDSPYGRGDSPYGRGDSPYGRGDSPYGRGDSPYGRGDSPYGRGDSPYGRGDSPYGRGDSPYGRGDSPYGRGDSPYGRGDSPYGRGDSPYGRGDSPYGRGDSPYGRGDSPYGRGDSPYGRGDSPYGRGDSPYGRGDSPYGRGDSPYGRGDSPYGRGDSPYGRGDSPYGRGDSPYGRGDSPYGRGDSPYGRGDSPYGRGDSPYGRGDSPYGRGDSPYGRGDSPYGRGDSPYGRGDSPYGRGDSPYGRGDSPYGRGDSPYGRGDSPYGRGDSPYGRGDSPYGRGDSPYGRGDSPYGRGDSPYGRGDSPYGRGDSPYGRGDSPYGRGDSPYGRGDSPYGRGDSPYGRGDSPYGRGDSPYGRGDSPYGRGDSPYGRGDSPYGRGDSPYGRGDSPYGRGDSPYGRGDSPYGRGDSPYGRGDSPYGRGDSPYGRGDSPYGRGDSPYGRGDSPYGRGDSPYGRGDSPYGRGDSPYGRGDSPYGRGDSPYGRGDSPYGRGDSPYGRGDSPYGRGDSPYGRGDSPYGRGDSPYGRGDSPYGRGDSPYGRGDSPYGRGDSPYGRGDSPYGRGDSPYGRGDSPYGRGDSPYGRGDSPYGRGDSPYGRGDSPYGRGDSPYGRGDSPYGRGDSPYGRGDSPYGRGDSPYGRGDSPYGRGDSPYGRGDSPYGRGDSPYGRGDSPYGRGDSPYGRGDSPYGRGDSPYGRGDSPYGRGDSPYGRGDSPYGRGDSPYGRGDSPYGRGDSPYGRGDSPYGRGDSPYGRGDSPYGRGDSPYGRGDSPYGRGDSPYGRGDSPYGRGDSPYGRGDSPYGRGDSPYGRGDSPYGRGDSPYGRGDSPYGRGDSPYGRGDSPYGRGDSPYGRGDSPYGRGDSPYGRGDSPYGRGDSPYGRGDSPYGRGDSPYGRGDSPYGRGDSPYGRGDSPYGRGDSPYGRGDSPYGRGDSPYGRGDSPYGRGDSPYGRGDSPYGRGDSPYGRGDSPYGRGDSPYGRGDSPYGRGDSPYGRGDSPYGRGDSPYGRGDSPYGRGDSPYGRGDSPYGRGDSPYGRGDSPYGRGDSPYGRGDSPYGRGDSPYGRGDSPYGRGDSPYGRGDSPYGRGDSPYGRGDSPYGRGDSPYGRGDSPYGRGDSPYGRGDSPYGRGDSPYGRGDSPYGRGDSPYGRGDSPYGRGDSPYGRGDSPYGRGDSPYGRGDSPYGRGDSPYGRGDSPYGRGDSPYGRGDSPYGRGDSPYGRGDSPYGRGDSPYGRGDSPYGRGDSPYGRGDSPYGRGDSPYGRGDSPYGRGDSPYGRGDSPYGRGDSPYGRGDSPYGRGDSPYGRGDSPYGRGDSPYGRGDSPYGRGDSPYGRGDSPYGRGDSPYGRGDSPYGRGDSPYGRGDSPYGRGDSPYGRGDSPYGRGDSPYGRGDSPYGRGDSPYGRGDSPYGRGDSPYGRGDSPYGRGDSPYGRGDSPYGRGDSPYGRGDSPYGRGDSPYGRGDSPYGRGDSPYGRGDSPYGRGDSPYGRGDSPYGRGDSPYGRGDSPYGRGDSPYGRGDSPYGRGDSPYGRGDSPYGRGDSPYGRGDSPYGRGDSPYGRGDSPYGRGDSPYGRGDSPYGRGDSPYGRGDSPYGRGDSPYGRGDSPYGRGDSPYGRGDSPYGRGDSPYGRGDSPYGRGDSPYGRGDSPYGRGDSPYGRGDSPYGRGDSPYGRGDSPYGRGDSPYGRGDSPYGRGDSPYGRGDSPYGRGDSPYGRGDSPYGRGDSPYGRGDSPYGRGDSPYGRGDSPYGRGDSPYGRGDSPYGRGDSPYGRGDSPYGRGDSPYGRGDSPYGRGDSPYGRGDSPYGRGDSPYGRGDSPYGRGDSPYGRGDSPYGRGDSPYGRGDSPYGRGDSPYGRGDSPYGRGDSPYGRGDSPYGRGDSPYGRGDSPYGRGDSPYGRGDSPYGRGDSPYGRGDSPYGRGDSPYGRGDSPYGRGDSPYGRGDSPYGRGDSPYGRGDSPY

SEQ ID NO: 2 - protein, 3500 aa, Artificial Sequence
  resilin-like polypeptide
  SITE (8)..(3500): May be present or absent in groups of the repeat unit Gly Arg Gly Asp Ser Pro His
GRGDSPHGRGDSPHGRGDSPHGRGDSPHGRGDSPHGRGDSPHGRGDSPHGRGDSPHGRGDSPHGRGDSPHGRGDSPHGRGDSPHGRGDSPHGRGDSPHGRGDSPHGRGDSPHGRGDSPHGRGDSPHGRGDSPHGRGDSPHGRGDSPHGRGDSPHGRGDSPHGRGDSPHGRGDSPHGRGDSPHGRGDSPHGRGDSPHGRGDSPHGRGDSPHGRGDSPHGRGDSPHGRGDSPHGRGDSPHGRGDSPHGRGDSPHGRGDSPHGRGDSPHGRGDSPHGRGDSPHGRGDSPHGRGDSPHGRGDSPHGRGDSPHGRGDSPHGRGDSPHGRGDSPHGRGDSPHGRGDSPHGRGDSPHGRGDSPHGRGDSPHGRGDSPHGRGDSPHGRGDSPHGRGDSPHGRGDSPHGRGDSPHGRGDSPHGRGDSPHGRGDSPHGRGDSPHGRGDSPHGRGDSPHGRGDSPHGRGDSPHGRGDSPHGRGDSPHGRGDSPHGRGDSPHGRGDSPHGRGDSPHGRGDSPHGRGDSPHGRGDSPHGRGDSPHGRGDSPHGRGDSPHGRGDSPHGRGDSPHGRGDSPHGRGDSPHGRGDSPHGRGDSPHGRGDSPHGRGDSPHGRGDSPHGRGDSPHGRGDSPHGRGDSPHGRGDSPHGRGDSPHGRGDSPHGRGDSPHGRGDSPHGRGDSPHGRGDSPHGRGDSPHGRGDSPHGRGDSPHGRGDSPHGRGDSPHGRGDSPHGRGDSPHGRGDSPHGRGDSPHGRGDSPHGRGDSPHGRGDSPHGRGDSPHGRGDSPHGRGDSPHGRGDSPHGRGDSPHGRGDSPHGRGDSPHGRGDSPHGRGDSPHGRGDSPHGRGDSPHGRGDSPHGRGDSPHGRGDSPHGRGDSPHGRGDSPHGRGDSPHGRGDSPHGRGDSPHGRGDSPHGRGDSPHGRGDSPHGRGDSPHGRGDSPHGRGDSPHGRGDSPHGRGDSPHGRGDSPHGRGDSPHGRGDSPHGRGDSPHGRGDSPHGRGDSPHGRGDSPHGRGDSPHGRGDSPHGRGDSPHGRGDSPHGRGDSPHGRGDSPHGRGDSPHGRGDSPHGRGDSPHGRGDSPHGRGDSPHGRGDSPHGRGDSPHGRGDSPHGRGDSPHGRGDSPHGRGDSPHGRGDSPHGRGDSPHGRGDSPHGRGDSPHGRGDSPHGRGDSPHGRGDSPHGRGDSPHGRGDSPHGRGDSPHGRGDSPHGRGDSPHGRGDSPHGRGDSPHGRGDSPHGRGDSPHGRGDSPHGRGDSPHGRGDSPHGRGDSPHGRGDSPHGRGDSPHGRGDSPHGRGDSPHGRGDSPHGRGDSPHGRGDSPHGRGDSPHGRGDSPHGRGDSPHGRGDSPHGRGDSPHGRGDSPHGRGDSPHGRGDSPHGRGDSPHGRGDSPHGRGDSPHGRGDSPHGRGDSPHGRGDSPHGRGDSPHGRGDSPHGRGDSPHGRGDSPHGRGDSPHGRGDSPHGRGDSPHGRGDSPHGRGDSPHGRGDSPHGRGDSPHGRGDSPHGRGDSPHGRGDSPHGRGDSPHGRGDSPHGRGDSPHGRGDSPHGRGDSPHGRGDSPHGRGDSPHGRGDSPHGRGDSPHGRGDSPHGRGDSPHGRGDSPHGRGDSPHGRGDSPHGRGDSPHGRGDSPHGRGDSPHGRGDSPHGRGDSPHGRGDSPHGRGDSPHGRGDSPHGRGDSPHGRGDSPHGRGDSPHGRGDSPHGRGDSPHGRGDSPHGRGDSPHGRGDSPHGRGDSPHGRGDSPHGRGDSPHGRGDSPHGRGDSPHGRGDSPHGRGDSPHGRGDSPHGRGDSPHGRGDSPHGRGDSPHGRGDSPHGRGDSPHGRGDSPHGRGDSPHGRGDSPHGRGDSPHGRGDSPHGRGDSPHGRGDSPHGRGDSPHGRGDSPHGRGDSPHGRGDSPHGRGDSPHGRGDSPHGRGDSPHGRGDSPHGRGDSPHGRGDSPHGRGDSPHGRGDSPHGRGDSPHGRGDSPHGRGDSPHGRGDSPHGRGDSPHGRGDSPHGRGDSPHGRGDSPHGRGDSPHGRGDSPHGRGDSPHGRGDSPHGRGDSPHGRGDSPHGRGDSPHGRGDSPHGRGDSPHGRGDSPHGRGDSPHGRGDSPHGRGDSPHGRGDSPHGRGDSPHGRGDSPHGRGDSPHGRGDSPHGRGDSPHGRGDSPHGRGDSPHGRGDSPHGRGDSPHGRGDSPHGRGDSPHGRGDSPHGRGDSPHGRGDSPHGRGDSPHGRGDSPHGRGDSPHGRGDSPHGRGDSPHGRGDSPHGRGDSPHGRGDSPHGRGDSPHGRGDSPHGRGDSPHGRGDSPHGRGDSPHGRGDSPHGRGDSPHGRGDSPHGRGDSPHGRGDSPHGRGDSPHGRGDSPHGRGDSPHGRGDSPHGRGDSPHGRGDSPHGRGDSPHGRGDSPHGRGDSPHGRGDSPHGRGDSPHGRGDSPHGRGDSPHGRGDSPHGRGDSPHGRGDSPHGRGDSPHGRGDSPHGRGDSPHGRGDSPHGRGDSPHGRGDSPHGRGDSPHGRGDSPHGRGDSPHGRGDSPHGRGDSPHGRGDSPHGRGDSPHGRGDSPHGRGDSPHGRGDSPHGRGDSPHGRGDSPHGRGDSPHGRGDSPHGRGDSPHGRGDSPHGRGDSPHGRGDSPHGRGDSPHGRGDSPHGRGDSPHGRGDSPHGRGDSPHGRGDSPHGRGDSPHGRGDSPHGRGDSPHGRGDSPHGRGDSPHGRGDSPHGRGDSPHGRGDSPHGRGDSPHGRGDSPHGRGDSPHGRGDSPHGRGDSPHGRGDSPHGRGDSPHGRGDSPHGRGDSPHGRGDSPHGRGDSPHGRGDSPHGRGDSPHGRGDSPHGRGDSPHGRGDSPHGRGDSPHGRGDSPHGRGDSPHGRGDSPHGRGDSPHGRGDSPHGRGDSPHGRGDSPHGRGDSPHGRGDSPHGRGDSPHGRGDSPHGRGDSPHGRGDSPHGRGDSPHGRGDSPHGRGDSPHGRGDSPHGRGDSPHGRGDSPHGRGDSPHGRGDSPHGRGDSPHGRGDSPHGRGDSPHGRGDSPHGRGDSPHGRGDSPHGRGDSPHGRGDSPHGRGDSPHGRGDSPHGRGDSPHGRGDSPHGRGDSPHGRGDSPHGRGDSPHGRGDSPHGRGDSPHGRGDSPHGRGDSPHGRGDSPHGRGDSPHGRGDSPHGRGDSPHGRGDSPHGRGDSPHGRGDSPHGRGDSPHGRGDSPHGRGDSPHGRGDSPHGRGDSPHGRGDSPHGRGDSPHGRGDSPHGRGDSPHGRGDSPHGRGDSPHGRGDSPHGRGDSPHGRGDSPHGRGDSPHGRGDSPHGRGDSPHGRGDSPHGRGDSPHGRGDSPHGRGDSPHGRGDSPHGRGDSPHGRGDSPHGRGDSPHGRGDSPHGRGDSPHGRGDSPHGRGDSPHGRGDSPHGRGDSPHGRGDSPHGRGDSPHGRGDSPHGRGDSPHGRGDSPHGRGDSPHGRGDSPHGRGDSPHGRGDSPHGRGDSPHGRGDSPHGRGDSPHGRGDSPHGRGDSPHGRGDSPHGRGDSPHGRGDSPHGRGDSPHGRGDSPHGRGDSPH

SEQ ID NO: 3 - protein, 3500 aa, Artificial Sequence
  resilin-like polypeptide
  SITE (8)..(3500): May be present or absent in groups of the repeat unit Gly Arg Gly Asp Ser Pro Val
GRGDSPVGRGDSPVGRGDSPVGRGDSPVGRGDSPVGRGDSPVGRGDSPVGRGDSPVGRGDSPVGRGDSPVGRGDSPVGRGDSPVGRGDSPVGRGDSPVGRGDSPVGRGDSPVGRGDSPVGRGDSPVGRGDSPVGRGDSPVGRGDSPVGRGDSPVGRGDSPVGRGDSPVGRGDSPVGRGDSPVGRGDSPVGRGDSPVGRGDSPVGRGDSPVGRGDSPVGRGDSPVGRGDSPVGRGDSPVGRGDSPVGRGDSPVGRGDSPVGRGDSPVGRGDSPVGRGDSPVGRGDSPVGRGDSPVGRGDSPVGRGDSPVGRGDSPVGRGDSPVGRGDSPVGRGDSPVGRGDSPVGRGDSPVGRGDSPVGRGDSPVGRGDSPVGRGDSPVGRGDSPVGRGDSPVGRGDSPVGRGDSPVGRGDSPVGRGDSPVGRGDSPVGRGDSPVGRGDSPVGRGDSPVGRGDSPVGRGDSPVGRGDSPVGRGDSPVGRGDSPVGRGDSPVGRGDSPVGRGDSPVGRGDSPVGRGDSPVGRGDSPVGRGDSPVGRGDSPVGRGDSPVGRGDSPVGRGDSPVGRGDSPVGRGDSPVGRGDSPVGRGDSPVGRGDSPVGRGDSPVGRGDSPVGRGDSPVGRGDSPVGRGDSPVGRGDSPVGRGDSPVGRGDSPVGRGDSPVGRGDSPVGRGDSPVGRGDSPVGRGDSPVGRGDSPVGRGDSPVGRGDSPVGRGDSPVGRGDSPVGRGDSPVGRGDSPVGRGDSPVGRGDSPVGRGDSPVGRGDSPVGRGDSPVGRGDSPVGRGDSPVGRGDSPVGRGDSPVGRGDSPVGRGDSPVGRGDSPVGRGDSPVGRGDSPVGRGDSPVGRGDSPVGRGDSPVGRGDSPVGRGDSPVGRGDSPVGRGDSPVGRGDSPVGRGDSPVGRGDSPVGRGDSPVGRGDSPVGRGDSPVGRGDSPVGRGDSPVGRGDSPVGRGDSPVGRGDSPVGRGDSPVGRGDSPVGRGDSPVGRGDSPVGRGDSPVGRGDSPVGRGDSPVGRGDSPVGRGDSPVGRGDSPVGRGDSPVGRGDSPVGRGDSPVGRGDSPVGRGDSPVGRGDSPVGRGDSPVGRGDSPVGRGDSPVGRGDSPVGRGDSPVGRGDSPVGRGDSPVGRGDSPVGRGDSPVGRGDSPVGRGDSPVGRGDSPVGRGDSPVGRGDSPVGRGDSPVGRGDSPVGRGDSPVGRGDSPVGRGDSPVGRGDSPVGRGDSPVGRGDSPVGRGDSPVGRGDSPVGRGDSPVGRGDSPVGRGDSPVGRGDSPVGRGDSPVGRGDSPVGRGDSPVGRGDSPVGRGDSPVGRGDSPVGRGDSPVGRGDSPVGRGDSPVGRGDSPVGRGDSPVGRGDSPVGRGDSPVGRGDSPVGRGDSPVGRGDSPVGRGDSPVGRGDSPVGRGDSPVGRGDSPVGRGDSPVGRGDSPVGRGDSPVGRGDSPVGRGDSPVGRGDSPVGRGDSPVGRGDSPVGRGDSPVGRGDSPVGRGDSPVGRGDSPVGRGDSPVGRGDSPVGRGDSPVGRGDSPVGRGDSPVGRGDSPVGRGDSPVGRGDSPVGRGDSPVGRGDSPVGRGDSPVGRGDSPVGRGDSPVGRGDSPVGRGDSPVGRGDSPVGRGDSPVGRGDSPVGRGDSPVGRGDSPVGRGDSPVGRGDSPVGRGDSPVGRGDSPVGRGDSPVGRGDSPVGRGDSPVGRGDSPVGRGDSPVGRGDSPVGRGDSPVGRGDSPVGRGDSPVGRGDSPVGRGDSPVGRGDSPVGRGDSPVGRGDSPVGRGDSPVGRGDSPVGRGDSPVGRGDSPVGRGDSPVGRGDSPVGRGDSPVGRGDSPVGRGDSPVGRGDSPVGRGDSPVGRGDSPVGRGDSPVGRGDSPVGRGDSPVGRGDSPVGRGDSPVGRGDSPVGRGDSPVGRGDSPVGRGDSPVGRGDSPVGRGDSPVGRGDSPVGRGDSPVGRGDSPVGRGDSPVGRGDSPVGRGDSPVGRGDSPVGRGDSPVGRGDSPVGRGDSPVGRGDSPVGRGDSPVGRGDSPVGRGDSPVGRGDSPVGRGDSPVGRGDSPVGRGDSPVGRGDSPVGRGDSPVGRGDSPVGRGDSPVGRGDSPVGRGDSPVGRGDSPVGRGDSPVGRGDSPVGRGDSPVGRGDSPVGRGDSPVGRGDSPVGRGDSPVGRGDSPVGRGDSPVGRGDSPVGRGDSPVGRGDSPVGRGDSPVGRGDSPVGRGDSPVGRGDSPVGRGDSPVGRGDSPVGRGDSPVGRGDSPVGRGDSPVGRGDSPVGRGDSPVGRGDSPVGRGDSPVGRGDSPVGRGDSPVGRGDSPVGRGDSPVGRGDSPVGRGDSPVGRGDSPVGRGDSPVGRGDSPVGRGDSPVGRGDSPVGRGDSPVGRGDSPVGRGDSPVGRGDSPVGRGDSPVGRGDSPVGRGDSPVGRGDSPVGRGDSPVGRGDSPVGRGDSPVGRGDSPVGRGDSPVGRGDSPVGRGDSPVGRGDSPVGRGDSPVGRGDSPVGRGDSPVGRGDSPVGRGDSPVGRGDSPVGRGDSPVGRGDSPVGRGDSPVGRGDSPVGRGDSPVGRGDSPVGRGDSPVGRGDSPVGRGDSPVGRGDSPVGRGDSPVGRGDSPVGRGDSPVGRGDSPVGRGDSPVGRGDSPVGRGDSPVGRGDSPVGRGDSPVGRGDSPVGRGDSPVGRGDSPVGRGDSPVGRGDSPVGRGDSPVGRGDSPVGRGDSPVGRGDSPVGRGDSPVGRGDSPVGRGDSPVGRGDSPVGRGDSPVGRGDSPVGRGDSPVGRGDSPVGRGDSPVGRGDSPVGRGDSPVGRGDSPVGRGDSPVGRGDSPVGRGDSPVGRGDSPVGRGDSPVGRGDSPVGRGDSPVGRGDSPVGRGDSPVGRGDSPVGRGDSPVGRGDSPVGRGDSPVGRGDSPVGRGDSPVGRGDSPVGRGDSPVGRGDSPVGRGDSPVGRGDSPVGRGDSPVGRGDSPVGRGDSPVGRGDSPVGRGDSPVGRGDSPVGRGDSPVGRGDSPVGRGDSPVGRGDSPVGRGDSPVGRGDSPVGRGDSPVGRGDSPVGRGDSPVGRGDSPVGRGDSPVGRGDSPVGRGDSPVGRGDSPVGRGDSPVGRGDSPVGRGDSPVGRGDSPVGRGDSPVGRGDSPVGRGDSPVGRGDSPVGRGDSPVGRGDSPVGRGDSPVGRGDSPVGRGDSPVGRGDSPVGRGDSPVGRGDSPVGRGDSPVGRGDSPVGRGDSPVGRGDSPVGRGDSPVGRGDSPVGRGDSPVGRGDSPVGRGDSPVGRGDSPVGRGDSPVGRGDSPVGRGDSPVGRGDSPVGRGDSPVGRGDSPVGRGDSPVGRGDSPVGRGDSPVGRGDSPVGRGDSPVGRGDSPVGRGDSPVGRGDSPVGRGDSPVGRGDSPVGRGDSPVGRGDSPVGRGDSPVGRGDSPVGRGDSPVGRGDSPVGRGDSPVGRGDSPVGRGDSPVGRGDSPVGRGDSPVGRGDSPVGRGDSPVGRGDSPVGRGDSPVGRGDSPVGRGDSPVGRGDSPVGRGDSPVGRGDSPVGRGDSPV

SEQ ID NO: 4 - protein, 4000 aa, Artificial Sequence
  resilin-like polypeptide
  SITE (9)..(4000): May be present or absent in groups of the repeat unit Gly Arg Gly Asp Ser Pro Tyr Gly
GRGDSPYGGRGDSPYGGRGDSPYGGRGDSPYGGRGDSPYGGRGDSPYGGRGDSPYGGRGDSPYGGRGDSPYGGRGDSPYGGRGDSPYGGRGDSPYGGRGDSPYGGRGDSPYGGRGDSPYGGRGDSPYGGRGDSPYGGRGDSPYGGRGDSPYGGRGDSPYGGRGDSPYGGRGDSPYGGRGDSPYGGRGDSPYGGRGDSPYGGRGDSPYGGRGDSPYGGRGDSPYGGRGDSPYGGRGDSPYGGRGDSPYGGRGDSPYGGRGDSPYGGRGDSPYGGRGDSPYGGRGDSPYGGRGDSPYGGRGDSPYGGRGDSPYGGRGDSPYGGRGDSPYGGRGDSPYGGRGDSPYGGRGDSPYGGRGDSPYGGRGDSPYGGRGDSPYGGRGDSPYGGRGDSPYGGRGDSPYGGRGDSPYGGRGDSPYGGRGDSPYGGRGDSPYGGRGDSPYGGRGDSPYGGRGDSPYGGRGDSPYGGRGDSPYGGRGDSPYGGRGDSPYGGRGDSPYGGRGDSPYGGRGDSPYGGRGDSPYGGRGDSPYGGRGDSPYGGRGDSPYGGRGDSPYGGRGDSPYGGRGDSPYGGRGDSPYGGRGDSPYGGRGDSPYGGRGDSPYGGRGDSPYGGRGDSPYGGRGDSPYGGRGDSPYGGRGDSPYGGRGDSPYGGRGDSPYGGRGDSPYGGRGDSPYGGRGDSPYGGRGDSPYGGRGDSPYGGRGDSPYGGRGDSPYGGRGDSPYGGRGDSPYGGRGDSPYGGRGDSPYGGRGDSPYGGRGDSPYGGRGDSPYGGRGDSPYGGRGDSPYGGRGDSPYGGRGDSPYGGRGDSPYGGRGDSPYGGRGDSPYGGRGDSPYGGRGDSPYGGRGDSPYGGRGDSPYGGRGDSPYGGRGDSPYGGRGDSPYGGRGDSPYGGRGDSPYGGRGDSPYGGRGDSPYGGRGDSPYGGRGDSPYGGRGDSPYGGRGDSPYGGRGDSPYGGRGDSPYGGRGDSPYGGRGDSPYGGRGDSPYGGRGDSPYGGRGDSPYGGRGDSPYGGRGDSPYGGRGDSPYGGRGDSPYGGRGDSPYGGRGDSPYGGRGDSPYGGRGDSPYGGRGDSPYGGRGDSPYGGRGDSPYGGRGDSPYGGRGDSPYGGRGDSPYGGRGDSPYGGRGDSPYGGRGDSPYGGRGDSPYGGRGDSPYGGRGDSPYGGRGDSPYGGRGDSPYGGRGDSPYGGRGDSPYGGRGDSPYGGRGDSPYGGRGDSPYGGRGDSPYGGRGDSPYGGRGDSPYGGRGDSPYGGRGDSPYGGRGDSPYGGRGDSPYGGRGDSPYGGRGDSPYGGRGDSPYGGRGDSPYGGRGDSPYGGRGDSPYGGRGDSPYGGRGDSPYGGRGDSPYGGRGDSPYGGRGDSPYGGRGDSPYGGRGDSPYGGRGDSPYGGRGDSPYGGRGDSPYGGRGDSPYGGRGDSPYGGRGDSPYGGRGDSPYGGRGDSPYGGRGDSPYGGRGDSPYGGRGDSPYGGRGDSPYGGRGDSPYGGRGDSPYGGRGDSPYGGRGDSPYGGRGDSPYGGRGDSPYGGRGDSPYGGRGDSPYGGRGDSPYGGRGDSPYGGRGDSPYGGRGDSPYGGRGDSPYGGRGDSPYGGRGDSPYGGRGDSPYGGRGDSPYGGRGDSPYGGRGDSPYGGRGDSPYGGRGDSPYGGRGDSPYGGRGDSPYGGRGDSPYGGRGDSPYGGRGDSPYGGRGDSPYGGRGDSPYGGRGDSPYGGRGDSPYGGRGDSPYGGRGDSPYGGRGDSPYGGRGDSPYGGRGDSPYGGRGDSPYGGRGDSPYGGRGDSPYGGRGDSPYGGRGDSPYGGRGDSPYGGRGDSPYGGRGDSPYGGRGDSPYGGRGDSPYGGRGDSPYGGRGDSPYGGRGDSPYGGRGDSPYGGRGDSPYGGRGDSPYGGRGDSPYGGRGDSPYGGRGDSPYGGRGDSPYGGRGDSPYGGRGDSPYGGRGDSPYGGRGDSPYGGRGDSPYGGRGDSPYGGRGDSPYGGRGDSPYGGRGDSPYGGRGDSPYGGRGDSPYGGRGDSPYGGRGDSPYGGRGDSPYGGRGDSPYGGRGDSPYGGRGDSPYGGRGDSPYGGRGDSPYGGRGDSPYGGRGDSPYGGRGDSPYGGRGDSPYGGRGDSPYGGRGDSPYGGRGDSPYGGRGDSPYGGRGDSPYGGRGDSPYGGRGDSPYGGRGDSPYGGRGDSPYGGRGDSPYGGRGDSPYGGRGDSPYGGRGDSPYGGRGDSPYGGRGDSPYGGRGDSPYGGRGDSPYGGRGDSPYGGRGDSPYGGRGDSPYGGRGDSPYGGRGDSPYGGRGDSPYGGRGDSPYGGRGDSPYGGRGDSPYGGRGDSPYGGRGDSPYGGRGDSPYGGRGDSPYGGRGDSPYGGRGDSPYGGRGDSPYGGRGDSPYGGRGDSPYGGRGDSPYGGRGDSPYGGRGDSPYGGRGDSPYGGRGDSPYGGRGDSPYGGRGDSPYGGRGDSPYGGRGDSPYGGRGDSPYGGRGDSPYGGRGDSPYGGRGDSPYGGRGDSPYGGRGDSPYGGRGDSPYGGRGDSPYGGRGDSPYGGRGDSPYGGRGDSPYGGRGDSPYGGRGDSPYGGRGDSPYGGRGDSPYGGRGDSPYGGRGDSPYGGRGDSPYGGRGDSPYGGRGDSPYGGRGDSPYGGRGDSPYGGRGDSPYGGRGDSPYGGRGDSPYGGRGDSPYGGRGDSPYGGRGDSPYGGRGDSPYGGRGDSPYGGRGDSPYGGRGDSPYGGRGDSPYGGRGDSPYGGRGDSPYGGRGDSPYGGRGDSPYGGRGDSPYGGRGDSPYGGRGDSPYGGRGDSPYGGRGDSPYGGRGDSPYGGRGDSPYGGRGDSPYGGRGDSPYGGRGDSPYGGRGDSPYGGRGDSPYGGRGDSPYGGRGDSPYGGRGDSPYGGRGDSPYGGRGDSPYGGRGDSPYGGRGDSPYGGRGDSPYGGRGDSPYGGRGDSPYGGRGDSPYGGRGDSPYGGRGDSPYGGRGDSPYGGRGDSPYGGRGDSPYGGRGDSPYGGRGDSPYGGRGDSPYGGRGDSPYGGRGDSPYGGRGDSPYGGRGDSPYGGRGDSPYGGRGDSPYGGRGDSPYGGRGDSPYGGRGDSPYGGRGDSPYGGRGDSPYGGRGDSPYGGRGDSPYGGRGDSPYGGRGDSPYGGRGDSPYGGRGDSPYGGRGDSPYGGRGDSPYGGRGDSPYGGRGDSPYGGRGDSPYGGRGDSPYGGRGDSPYGGRGDSPYGGRGDSPYGGRGDSPYGGRGDSPYGGRGDSPYGGRGDSPYGGRGDSPYGGRGDSPYGGRGDSPYGGRGDSPYGGRGDSPYGGRGDSPYGGRGDSPYGGRGDSPYGGRGDSPYGGRGDSPYGGRGDSPYGGRGDSPYGGRGDSPYGGRGDSPYGGRGDSPYGGRGDSPYGGRGDSPYGGRGDSPYGGRGDSPYGGRGDSPYGGRGDSPYGGRGDSPYGGRGDSPYGGRGDSPYGGRGDSPYGGRGDSPYGGRGDSPYGGRGDSPYGGRGDSPYGGRGDSPYGGRGDSPYGGRGDSPYGGRGDSPYGGRGDSPYGGRGDSPYGGRGDSPYGGRGDSPYGGRGDSPYGGRGDSPYGGRGDSPYGGRGDSPYGGRGDSPYGGRGDSPYGGRGDSPYGGRGDSPYGGRGDSPYGGRGDSPYGGRGDSPYGGRGDSPYGGRGDSPYGGRGDSPYGGRGDSPYGGRGDSPYGGRGDSPYGGRGDSPYGGRGDSPYGGRGDSPYGGRGDSPYGGRGDSPYGGRGDSPYGGRGDSPYGGRGDSPYGGRGDSPYGGRGDSPYGGRGDSPYGGRGDSPYGGRGDSPYGGRGDSPYGGRGDSPYGGRGDSPYGGRGDSPYGGRGDSPYGGRGDSPYGGRGDSPYGGRGDSPYGGRGDSPYGGRGDSPYGGRGDSPYGGRGDSPYGGRGDSPYGGRGDSPYGGRGDSPYGGRGDSPYGGRGDSPYGGRGDSPYGGRGDSPYGGRGDSPYGGRGDSPYGGRGDSPYGGRGDSPYGGRGDSPYGGRGDSPYGGRGDSPYGGRGDSPYGGRGDSPYGGRGDSPYG

SEQ ID NO: 5 - protein, 3500 aa, Artificial Sequence
  resilin-like polypeptide
  SITE (8)..(3500): May be present or absent in groups of the repeat unit Arg Pro Leu Gly Tyr Asp Ser
RPLGYDSRPLGYDSRPLGYDSRPLGYDSRPLGYDSRPLGYDSRPLGYDSRPLGYDSRPLGYDSRPLGYDSRPLGYDSRPLGYDSRPLGYDSRPLGYDSRPLGYDSRPLGYDSRPLGYDSRPLGYDSRPLGYDSRPLGYDSRPLGYDSRPLGYDSRPLGYDSRPLGYDSRPLGYDSRPLGYDSRPLGYDSRPLGYDSRPLGYDSRPLGYDSRPLGYDSRPLGYDSRPLGYDSRPLGYDSRPLGYDSRPLGYDSRPLGYDSRPLGYDSRPLGYDSRPLGYDSRPLGYDSRPLGYDSRPLGYDSRPLGYDSRPLGYDSRPLGYDSRPLGYDSRPLGYDSRPLGYDSRPLGYDSRPLGYDSRPLGYDSRPLGYDSRPLGYDSRPLGYDSRPLGYDSRPLGYDSRPLGYDSRPLGYDSRPLGYDSRPLGYDSRPLGYDSRPLGYDSRPLGYDSRPLGYDSRPLGYDSRPLGYDSRPLGYDSRPLGYDSRPLGYDSRPLGYDSRPLGYDSRPLGYDSRPLGYDSRPLGYDSRPLGYDSRPLGYDSRPLGYDSRPLGYDSRPLGYDSRPLGYDSRPLGYDSRPLGYDSRPLGYDSRPLGYDSRPLGYDSRPLGYDSRPLGYDSRPLGYDSRPLGYDSRPLGYDSRPLGYDSRPLGYDSRPLGYDSRPLGYDSRPLGYDSRPLGYDSRPLGYDSRPLGYDSRPLGYDSRPLGYDSRPLGYDSRPLGYDSRPLGYDSRPLGYDSRPLGYDSRPLGYDSRPLGYDSRPLGYDSRPLGYDSRPLGYDSRPLGYDSRPLGYDSRPLGYDSRPLGYDSRPLGYDSRPLGYDSRPLGYDSRPLGYDSRPLGYDSRPLGYDSRPLGYDSRPLGYDSRPLGYDSRPLGYDSRPLGYDSRPLGYDSRPLGYDSRPLGYDSRPLGYDSRPLGYDSRPLGYDSRPLGYDSRPLGYDSRPLGYDSRPLGYDSRPLGYDSRPLGYDSRPLGYDSRPLGYDSRPLGYDSRPLGYDSRPLGYDSRPLGYDSRPLGYDSRPLGYDSRPLGYDSRPLGYDSRPLGYDSRPLGYDSRPLGYDSRPLGYDSRPLGYDSRPLGYDSRPLGYDSRPLGYDSRPLGYDSRPLGYDSRPLGYDSRPLGYDSRPLGYDSRPLGYDSRPLGYDSRPLGYDSRPLGYDSRPLGYDSRPLGYDSRPLGYDSRPLGYDSRPLGYDSRPLGYDSRPLGYDSRPLGYDSRPLGYDSRPLGYDSRPLGYDSRPLGYDSRPLGYDSRPLGYDSRPLGYDSRPLGYDSRPLGYDSRPLGYDSRPLGYDSRPLGYDSRPLGYDSRPLGYDSRPLGYDSRPLGYDSRPLGYDSRPLGYDSRPLGYDSRPLGYDSRPLGYDSRPLGYDSRPLGYDSRPLGYDSRPLGYDSRPLGYDSRPLGYDSRPLGYDSRPLGYDSRPLGYDSRPLGYDSRPLGYDSRPLGYDSRPLGYDSRPLGYDSRPLGYDSRPLGYDSRPLGYDSRPLGYDSRPLGYDSRPLGYDSRPLGYDSRPLGYDSRPLGYDSRPLGYDSRPLGYDSRPLGYDSRPLGYDSRPLGYDSRPLGYDSRPLGYDSRPLGYDSRPLGYDSRPLGYDSRPLGYDSRPLGYDSRPLGYDSRPLGYDSRPLGYDSRPLGYDSRPLGYDSRPLGYDSRPLGYDSRPLGYDSRPLGYDSRPLGYDSRPLGYDSRPLGYDSRPLGYDSRPLGYDSRPLGYDSRPLGYDSRPLGYDSRPLGYDSRPLGYDSRPLGYDSRPLGYDSRPLGYDSRPLGYDSRPLGYDSRPLGYDSRPLGYDSRPLGYDSRPLGYDSRPLGYDSRPLGYDSRPLGYDSRPLGYDSRPLGYDSRPLGYDSRPLGYDSRPLGYDSRPLGYDSRPLGYDSRPLGYDSRPLGYDSRPLGYDSRPLGYDSRPLGYDSRPLGYDSRPLGYDSRPLGYDSRPLGYDSRPLGYDSRPLGYDSRPLGYDSRPLGYDSRPLGYDSRPLGYDSRPLGYDSRPLGYDSRPLGYDSRPLGYDSRPLGYDSRPLGYDSRPLGYDSRPLGYDSRPLGYDSRPLGYDSRPLGYDSRPLGYDSRPLGYDSRPLGYDSRPLGYDSRPLGYDSRPLGYDSRPLGYDSRPLGYDSRPLGYDSRPLGYDSRPLGYDSRPLGYDSRPLGYDSRPLGYDSRPLGYDSRPLGYDSRPLGYDSRPLGYDSRPLGYDSRPLGYDSRPLGYDSRPLGYDSRPLGYDSRPLGYDSRPLGYDSRPLGYDSRPLGYDSRPLGYDSRPLGYDSRPLGYDSRPLGYDSRPLGYDSRPLGYDSRPLGYDSRPLGYDSRPLGYDSRPLGYDSRPLGYDSRPLGYDSRPLGYDSRPLGYDSRPLGYDSRPLGYDSRPLGYDSRPLGYDSRPLGYDSRPLGYDSRPLGYDSRPLGYDSRPLGYDSRPLGYDSRPLGYDSRPLGYDSRPLGYDSRPLGYDSRPLGYDSRPLGYDSRPLGYDSRPLGYDSRPLGYDSRPLGYDSRPLGYDSRPLGYDSRPLGYDSRPLGYDSRPLGYDSRPLGYDSRPLGYDSRPLGYDSRPLGYDSRPLGYDSRPLGYDSRPLGYDSRPLGYDSRPLGYDSRPLGYDSRPLGYDSRPLGYDSRPLGYDSRPLGYDSRPLGYDSRPLGYDSRPLGYDSRPLGYDSRPLGYDSRPLGYDSRPLGYDSRPLGYDSRPLGYDSRPLGYDSRPLGYDSRPLGYDSRPLGYDSRPLGYDSRPLGYDSRPLGYDSRPLGYDSRPLGYDSRPLGYDSRPLGYDSRPLGYDSRPLGYDSRPLGYDSRPLGYDSRPLGYDSRPLGYDSRPLGYDSRPLGYDSRPLGYDSRPLGYDSRPLGYDSRPLGYDSRPLGYDSRPLGYDSRPLGYDSRPLGYDSRPLGYDSRPLGYDSRPLGYDSRPLGYDSRPLGYDSRPLGYDSRPLGYDSRPLGYDSRPLGYDSRPLGYDSRPLGYDSRPLGYDSRPLGYDSRPLGYDSRPLGYDSRPLGYDSRPLGYDSRPLGYDSRPLGYDSRPLGYDSRPLGYDSRPLGYDSRPLGYDSRPLGYDSRPLGYDSRPLGYDSRPLGYDSRPLGYDSRPLGYDSRPLGYDSRPLGYDSRPLGYDSRPLGYDSRPLGYDSRPLGYDSRPLGYDSRPLGYDSRPLGYDSRPLGYDSRPLGYDSRPLGYDSRPLGYDSRPLGYDSRPLGYDSRPLGYDSRPLGYDSRPLGYDSRPLGYDSRPLGYDSRPLGYDSRPLGYDSRPLGYDSRPLGYDSRPLGYDSRPLGYDSRPLGYDSRPLGYDSRPLGYDSRPLGYDSRPLGYDSRPLGYDSRPLGYDSRPLGYDSRPLGYDSRPLGYDSRPLGYDSRPLGYDSRPLGYDSRPLGYDSRPLGYDSRPLGYDSRPLGYDSRPLGYDSRPLGYDSRPLGYDSRPLGYDSRPLGYDSRPLGYDSRPLGYDSRPLGYDSRPLGYDSRPLGYDSRPLGYDSRPLGYDSRPLGYDSRPLGYDSRPLGYDSRPLGYDSRPLGYDSRPLGYDSRPLGYDS

SEQ ID NO: 6 - protein, 3500 aa, Artificial Sequence
  resilin-like polypeptide
  SITE (8)..(3500): May be present or absent in groups of the repeat unit Arg Pro Ala Gly Tyr Asp Ser
RPAGYDSRPAGYDSRPAGYDSRPAGYDSRPAGYDSRPAGYDSRPAGYDSRPAGYDSRPAGYDSRPAGYDSRPAGYDSRPAGYDSRPAGYDSRPAGYDSRPAGYDSRPAGYDSRPAGYDSRPAGYDSRPAGYDSRPAGYDSRPAGYDSRPAGYDSRPAGYDSRPAGYDSRPAGYDSRPAGYDSRPAGYDSRPAGYDSRPAGYDSRPAGYDSRPAGYDSRPAGYDSRPAGYDSRPAGYDSRPAGYDSRPAGYDSRPAGYDSRPAGYDSRPAGYDSRPAGYDSRPAGYDSRPAGYDSRPAGYDSRPAGYDSRPAGYDSRPAGYDSRPAGYDSRPAGYDSRPAGYDSRPAGYDSRPAGYDSRPAGYDSRPAGYDSRPAGYDSRPAGYDSRPAGYDSRPAGYDSRPAGYDSRPAGYDSRPAGYDSRPAGYDSRPAGYDSRPAGYDSRPAGYDSRPAGYDSRPAGYDSRPAGYDSRPAGYDSRPAGYDSRPAGYDSRPAGYDSRPAGYDSRPAGYDSRPAGYDSRPAGYDSRPAGYDSRPAGYDSRPAGYDSRPAGYDSRPAGYDSRPAGYDSRPAGYDSRPAGYDSRPAGYDSRPAGYDSRPAGYDSRPAGYDSRPAGYDSRPAGYDSRPAGYDSRPAGYDSRPAGYDSRPAGYDSRPAGYDSRPAGYDSRPAGYDSRPAGYDSRPAGYDSRPAGYDSRPAGYDSRPAGYDSRPAGYDSRPAGYDSRPAGYDSRPAGYDSRPAGYDSRPAGYDSRPAGYDSRPAGYDSRPAGYDSRPAGYDSRPAGYDSRPAGYDSRPAGYDSRPAGYDSRPAGYDSRPAGYDSRPAGYDSRPAGYDSRPAGYDSRPAGYDSRPAGYDSRPAGYDSRPAGYDSRPAGYDSRPAGYDSRPAGYDSRPAGYDSRPAGYDSRPAGYDSRPAGYDSRPAGYDSRPAGYDSRPAGYDSRPAGYDSRPAGYDSRPAGYDSRPAGYDSRPAGYDSRPAGYDSRPAGYDSRPAGYDSRPAGYDSRPAGYDSRPAGYDSRPAGYDSRPAGYDSRPAGYDSRPAGYDSRPAGYDSRPAGYDSRPAGYDSRPAGYDSRPAGYDSRPAGYDSRPAGYDSRPAGYDSRPAGYDSRPAGYDSRPAGYDSRPAGYDSRPAGYDSRPAGYDSRPAGYDSRPAGYDSRPAGYDSRPAGYDSRPAGYDSRPAGYDSRPAGYDSRPAGYDSRPAGYDSRPAGYDSRPAGYDSRPAGYDSRPAGYDSRPAGYDSRPAGYDSRPAGYDSRPAGYDSRPAGYDSRPAGYDSRPAGYDSRPAGYDSRPAGYDSRPAGYDSRPAGYDSRPAGYDSRPAGYDSRPAGYDSRPAGYDSRPAGYDSRPAGYDSRPAGYDSRPAGYDSRPAGYDSRPAGYDSRPAGYDSRPAGYDSRPAGYDSRPAGYDSRPAGYDSRPAGYDSRPAGYDSRPAGYDSRPAGYDSRPAGYDSRPAGYDSRPAGYDSRPAGYDSRPAGYDSRPAGYDSRPAGYDSRPAGYDSRPAGYDSRPAGYDSRPAGYDSRPAGYDSRPAGYDSRPAGYDSRPAGYDSRPAGYDSRPAGYDSRPAGYDSRPAGYDSRPAGYDSRPAGYDSRPAGYDSRPAGYDSRPAGYDSRPAGYDSRPAGYDSRPAGYDSRPAGYDSRPAGYDSRPAGYDSRPAGYDSRPAGYDSRPAGYDSRPAGYDSRPAGYDSRPAGYDSRPAGYDSRPAGYDSRPAGYDSRPAGYDSRPAGYDSRPAGYDSRPAGYDSRPAGYDSRPAGYDSRPAGYDSRPAGYDSRPAGYDSRPAGYDSRPAGYDSRPAGYDSRPAGYDSRPAGYDSRPAGYDSRPAGYDSRPAGYDSRPAGYDSRPAGYDSRPAGYDSRPAGYDSRPAGYDSRPAGYDSRPAGYDSRPAGYDSRPAGYDSRPAGYDSRPAGYDSRPAGYDSRPAGYDSRPAGYDSRPAGYDSRPAGYDSRPAGYDSRPAGYDSRPAGYDSRPAGYDSRPAGYDSRPAGYDSRPAGYDSRPAGYDSRPAGYDSRPAGYDSRPAGYDSRPAGYDSRPAGYDSRPAGYDSRPAGYDSRPAGYDSRPAGYDSRPAGYDSRPAGYDSRPAGYDSRPAGYDSRPAGYDSRPAGYDSRPAGYDSRPAGYDSRPAGYDSRPAGYDSRPAGYDSRPAGYDSRPAGYDSRPAGYDSRPAGYDSRPAGYDSRPAGYDSRPAGYDSRPAGYDSRPAGYDSRPAGYDSRPAGYDSRPAGYDSRPAGYDSRPAGYDSRPAGYDSRPAGYDSRPAGYDSRPAGYDSRPAGYDSRPAGYDSRPAGYDSRPAGYDSRPAGYDSRPAGYDSRPAGYDSRPAGYDSRPAGYDSRPAGYDSRPAGYDSRPAGYDSRPAGYDSRPAGYDSRPAGYDSRPAGYDSRPAGYDSRPAGYDSRPAGYDSRPAGYDSRPAGYDSRPAGYDSRPAGYDSRPAGYDSRPAGYDSRPAGYDSRPAGYDSRPAGYDSRPAGYDSRPAGYDSRPAGYDSRPAGYDSRPAGYDSRPAGYDSRPAGYDSRPAGYDSRPAGYDSRPAGYDSRPAGYDSRPAGYDSRPAGYDSRPAGYDSRPAGYDSRPAGYDSRPAGYDSRPAGYDSRPAGYDSRPAGYDSRPAGYDSRPAGYDSRPAGYDSRPAGYDSRPAGYDSRPAGYDSRPAGYDSRPAGYDSRPAGYDSRPAGYDSRPAGYDSRPAGYDSRPAGYDSRPAGYDSRPAGYDSRPAGYDSRPAGYDSRPAGYDSRPAGYDSRPAGYDSRPAGYDSRPAGYDSRPAGYDSRPAGYDSRPAGYDSRPAGYDSRPAGYDSRPAGYDSRPAGYDSRPAGYDSRPAGYDSRPAGYDSRPAGYDSRPAGYDSRPAGYDSRPAGYDSRPAGYDSRPAGYDSRPAGYDSRPAGYDSRPAGYDSRPAGYDSRPAGYDSRPAGYDSRPAGYDSRPAGYDSRPAGYDSRPAGYDSRPAGYDSRPAGYDSRPAGYDSRPAGYDSRPAGYDSRPAGYDSRPAGYDSRPAGYDSRPAGYDSRPAGYDSRPAGYDSRPAGYDSRPAGYDSRPAGYDSRPAGYDSRPAGYDSRPAGYDSRPAGYDSRPAGYDSRPAGYDSRPAGYDSRPAGYDSRPAGYDSRPAGYDSRPAGYDSRPAGYDSRPAGYDSRPAGYDSRPAGYDSRPAGYDSRPAGYDSRPAGYDSRPAGYDSRPAGYDSRPAGYDSRPAGYDSRPAGYDSRPAGYDSRPAGYDSRPAGYDSRPAGYDSRPAGYDSRPAGYDSRPAGYDSRPAGYDSRPAGYDSRPAGYDSRPAGYDSRPAGYDSRPAGYDSRPAGYDSRPAGYDSRPAGYDSRPAGYDSRPAGYDSRPAGYDSRPAGYDSRPAGYDSRPAGYDSRPAGYDSRPAGYDSRPAGYDSRPAGYDSRPAGYDSRPAGYDSRPAGYDSRPAGYDSRPAGYDSRPAGYDSRPAGYDSRPAGYDSRPAGYDSRPAGYDSRPAGYDSRPAGYDSRPAGYDSRPAGYDSRPAGYDSRPAGYDSRPAGYDS

SEQ ID NO: 7 - protein, 3500 aa, Artificial Sequence
  resilin-like polypeptide
  SITE (8)..(3500): May be present or absent in groups of the repeat unit Gly Arg Gly Asp Ser Tyr Pro
GRGDSYPGRGDSYPGRGDSYPGRGDSYPGRGDSYPGRGDSYPGRGDSYPGRGDSYPGRGDSYPGRGDSYPGRGDSYPGRGDSYPGRGDSYPGRGDSYPGRGDSYPGRGDSYPGRGDSYPGRGDSYPGRGDSYPGRGDSYPGRGDSYPGRGDSYPGRGDSYPGRGDSYPGRGDSYPGRGDSYPGRGDSYPGRGDSYPGRGDSYPGRGDSYPGRGDSYPGRGDSYPGRGDSYPGRGDSYPGRGDSYPGRGDSYPGRGDSYPGRGDSYPGRGDSYPGRGDSYPGRGDSYPGRGDSYPGRGDSYPGRGDSYPGRGDSYPGRGDSYPGRGDSYPGRGDSYPGRGDSYPGRGDSYPGRGDSYPGRGDSYPGRGDSYPGRGDSYPGRGDSYPGRGDSYPGRGDSYPGRGDSYPGRGDSYPGRGDSYPGRGDSYPGRGDSYPGRGDSYPGRGDSYPGRGDSYPGRGDSYPGRGDSYPGRGDSYPGRGDSYPGRGDSYPGRGDSYPGRGDSYPGRGDSYPGRGDSYPGRGDSYPGRGDSYPGRGDSYPGRGDSYPGRGDSYPGRGDSYPGRGDSYPGRGDSYPGRGDSYPGRGDSYPGRGDSYPGRGDSYPGRGDSYPGRGDSYPGRGDSYPGRGDSYPGRGDSYPGRGDSYPGRGDSYPGRGDSYPGRGDSYPGRGDSYPGRGDSYPGRGDSYPGRGDSYPGRGDSYPGRGDSYPGRGDSYPGRGDSYPGRGDSYPGRGDSYPGRGDSYPGRGDSYPGRGDSYPGRGDSYPGRGDSYPGRGDSYPGRGDSYPGRGDSYPGRGDSYPGRGDSYPGRGDSYPGRGDSYPGRGDSYPGRGDSYPGRGDSYPGRGDSYPGRGDSYPGRGDSYPGRGDSYPGRGDSYPGRGDSYPGRGDSYPGRGDSYPGRGDSYPGRGDSYPGRGDSYPGRGDSYPGRGDSYPGRGDSYPGRGDSYPGRGDSYPGRGDSYPGRGDSYPGRGDSYPGRGDSYPGRGDSYPGRGDSYPGRGDSYPGRGDSYPGRGDSYPGRGDSYPGRGDSYPGRGDSYPGRGDSYPGRGDSYPGRGDSYPGRGDSYPGRGDSYPGRGDSYPGRGDSYPGRGDSYPGRGDSYPGRGDSYPGRGDSYPGRGDSYPGRGDSYPGRGDSYPGRGDSYPGRGDSYPGRGDSYPGRGDSYPGRGDSYPGRGDSYPGRGDSYPGRGDSYPGRGDSYPGRGDSYPGRGDSYPGRGDSYPGRGDSYPGRGDSYPGRGDSYPGRGDSYPGRGDSYPGRGDSYPGRGDSYPGRGDSYPGRGDSYPGRGDSYPGRGDSYPGRGDSYPGRGDSYPGRGDSYPGRGDSYPGRGDSYPGRGDSYPGRGDSYPGRGDSYPGRGDSYPGRGDSYPGRGDSYPGRGDSYPGRGDSYPGRGDSYPGRGDSYPGRGDSYPGRGDSYPGRGDSYPGRGDSYPGRGDSYPGRGDSYPGRGDSYPGRGDSYPGRGDSYPGRGDSYPGRGDSYPGRGDSYPGRGDSYPGRGDSYPGRGDSYPGRGDSYPGRGDSYPGRGDSYPGRGDSYPGRGDSYPGRGDSYPGRGDSYPGRGDSYPGRGDSYPGRGDSYPGRGDSYPGRGDSYPGRGDSYPGRGDSYPGRGDSYPGRGDSYPGRGDSYPGRGDSYPGRGDSYPGRGDSYPGRGDSYPGRGDSYPGRGDSYPGRGDSYPGRGDSYPGRGDSYPGRGDSYPGRGDSYPGRGDSYPGRGDSYPGRGDSYPGRGDSYPGRGDSYPGRGDSYPGRGDSYPGRGDSYPGRGDSYPGRGDSYPGRGDSYPGRGDSYPGRGDSYPGRGDSYPGRGDSYPGRGDSYPGRGDSYPGRGDSYPGRGDSYPGRGDSYPGRGDSYPGRGDSYPGRGDSYPGRGDSYPGRGDSYPGRGDSYPGRGDSYPGRGDSYPGRGDSYPGRGDSYPGRGDSYPGRGDSYPGRGDSYPGRGDSYPGRGDSYPGRGDSYPGRGDSYPGRGDSYPGRGDSYPGRGDSYPGRGDSYPGRGDSYPGRGDSYPGRGDSYPGRGDSYPGRGDSYPGRGDSYPGRGDSYPGRGDSYPGRGDSYPGRGDSYPGRGDSYPGRGDSYPGRGDSYPGRGDSYPGRGDSYPGRGDSYPGRGDSYPGRGDSYPGRGDSYPGRGDSYPGRGDSYPGRGDSYPGRGDSYPGRGDSYPGRGDSYPGRGDSYPGRGDSYPGRGDSYPGRGDSYPGRGDSYPGRGDSYPGRGDSYPGRGDSYPGRGDSYPGRGDSYPGRGDSYPGRGDSYPGRGDSYPGRGDSYPGRGDSYPGRGDSYPGRGDSYPGRGDSYPGRGDSYPGRGDSYPGRGDSYPGRGDSYPGRGDSYPGRGDSYPGRGDSYPGRGDSYPGRGDSYPGRGDSYPGRGDSYPGRGDSYPGRGDSYPGRGDSYPGRGDSYPGRGDSYPGRGDSYPGRGDSYPGRGDSYPGRGDSYPGRGDSYPGRGDSYPGRGDSYPGRGDSYPGRGDSYPGRGDSYPGRGDSYPGRGDSYPGRGDSYPGRGDSYPGRGDSYPGRGDSYPGRGDSYPGRGDSYPGRGDSYPGRGDSYPGRGDSYPGRGDSYPGRGDSYPGRGDSYPGRGDSYPGRGDSYPGRGDSYPGRGDSYPGRGDSYPGRGDSYPGRGDSYPGRGDSYPGRGDSYPGRGDSYPGRGDSYPGRGDSYPGRGDSYPGRGDSYPGRGDSYPGRGDSYPGRGDSYPGRGDSYPGRGDSYPGRGDSYPGRGDSYPGRGDSYPGRGDSYPGRGDSYPGRGDSYPGRGDSYPGRGDSYPGRGDSYPGRGDSYPGRGDSYPGRGDSYPGRGDSYPGRGDSYPGRGDSYPGRGDSYPGRGDSYPGRGDSYPGRGDSYPGRGDSYPGRGDSYPGRGDSYPGRGDSYPGRGDSYPGRGDSYPGRGDSYPGRGDSYPGRGDSYPGRGDSYPGRGDSYPGRGDSYPGRGDSYPGRGDSYPGRGDSYPGRGDSYPGRGDSYPGRGDSYPGRGDSYPGRGDSYPGRGDSYPGRGDSYPGRGDSYPGRGDSYPGRGDSYPGRGDSYPGRGDSYPGRGDSYPGRGDSYPGRGDSYPGRGDSYPGRGDSYPGRGDSYPGRGDSYPGRGDSYPGRGDSYPGRGDSYPGRGDSYPGRGDSYPGRGDSYPGRGDSYPGRGDSYPGRGDSYPGRGDSYPGRGDSYPGRGDSYPGRGDSYPGRGDSYPGRGDSYPGRGDSYPGRGDSYPGRGDSYPGRGDSYPGRGDSYPGRGDSYPGRGDSYPGRGDSYPGRGDSYPGRGDSYPGRGDSYPGRGDSYPGRGDSYPGRGDSYPGRGDSYPGRGDSYPGRGDSYPGRGDSYPGRGDSYPGRGDSYPGRGDSYPGRGDSYPGRGDSYPGRGDSYPGRGDSYPGRGDSYPGRGDSYPGRGDSYPGRGDSYPGRGDSYPGRGDSYPGRGDSYPGRGDSYPGRGDSYPGRGDSYPGRGDSYPGRGDSYPGRGDSYPGRGDSYPGRGDSYPGRGDSYPGRGDSYPGRGDSYPGRGDSYPGRGDSYPGRGDSYP

SEQ ID NO: 8 - protein, 4000 aa, Artificial Sequence
  resilin-like polypeptide
  SITE (9)..(4000): May be present or absent in groups of the repeat unit Gly Arg Gly Asp Ser Pro Tyr Gln
GRGDSPYQGRGDSPYQGRGDSPYQGRGDSPYQGRGDSPYQGRGDSPYQGRGDSPYQGRGDSPYQGRGDSPYQGRGDSPYQGRGDSPYQGRGDSPYQGRGDSPYQGRGDSPYQGRGDSPYQGRGDSPYQGRGDSPYQGRGDSPYQGRGDSPYQGRGDSPYQGRGDSPYQGRGDSPYQGRGDSPYQGRGDSPYQGRGDSPYQGRGDSPYQGRGDSPYQGRGDSPYQGRGDSPYQGRGDSPYQGRGDSPYQGRGDSPYQGRGDSPYQGRGDSPYQGRGDSPYQGRGDSPYQGRGDSPYQGRGDSPYQGRGDSPYQGRGDSPYQGRGDSPYQGRGDSPYQGRGDSPYQGRGDSPYQGRGDSPYQGRGDSPYQGRGDSPYQGRGDSPYQGRGDSPYQGRGDSPYQGRGDSPYQGRGDSPYQGRGDSPYQGRGDSPYQGRGDSPYQGRGDSPYQGRGDSPYQGRGDSPYQGRGDSPYQGRGDSPYQGRGDSPYQGRGDSPYQGRGDSPYQGRGDSPYQGRGDSPYQGRGDSPYQGRGDSPYQGRGDSPYQGRGDSPYQGRGDSPYQGRGDSPYQGRGDSPYQGRGDSPYQGRGDSPYQGRGDSPYQGRGDSPYQGRGDSPYQGRGDSPYQGRGDSPYQGRGDSPYQGRGDSPYQGRGDSPYQGRGDSPYQGRGDSPYQGRGDSPYQGRGDSPYQGRGDSPYQGRGDSPYQGRGDSPYQGRGDSPYQGRGDSPYQGRGDSPYQGRGDSPYQGRGDSPYQGRGDSPYQGRGDSPYQGRGDSPYQGRGDSPYQGRGDSPYQGRGDSPYQGRGDSPYQGRGDSPYQGRGDSPYQGRGDSPYQGRGDSPYQGRGDSPYQGRGDSPYQGRGDSPYQGRGDSPYQGRGDSPYQGRGDSPYQGRGDSPYQGRGDSPYQGRGDSPYQGRGDSPYQGRGDSPYQGRGDSPYQGRGDSPYQGRGDSPYQGRGDSPYQGRGDSPYQGRGDSPYQGRGDSPYQGRGDSPYQGRGDSPYQGRGDSPYQGRGDSPYQGRGDSPYQGRGDSPYQGRGDSPYQGRGDSPYQGRGDSPYQGRGDSPYQGRGDSPYQGRGDSPYQGRGDSPYQGRGDSPYQGRGDSPYQGRGDSPYQGRGDSPYQGRGDSPYQGRGDSPYQGRGDSPYQGRGDSPYQGRGDSPYQGRGDSPYQGRGDSPYQGRGDSPYQGRGDSPYQGRGDSPYQGRGDSPYQGRGDSPYQGRGDSPYQGRGDSPYQGRGDSPYQGRGDSPYQGRGDSPYQGRGDSPYQGRGDSPYQGRGDSPYQGRGDSPYQGRGDSPYQGRGDSPYQGRGDSPYQGRGDSPYQGRGDSPYQGRGDSPYQGRGDSPYQGRGDSPYQGRGDSPYQGRGDSPYQGRGDSPYQGRGDSPYQGRGDSPYQGRGDSPYQGRGDSPYQGRGDSPYQGRGDSPYQGRGDSPYQGRGDSPYQGRGDSPYQGRGDSPYQGRGDSPYQGRGDSPYQGRGDSPYQGRGDSPYQGRGDSPYQGRGDSPYQGRGDSPYQGRGDSPYQGRGDSPYQGRGDSPYQGRGDSPYQGRGDSPYQGRGDSPYQGRGDSPYQGRGDSPYQGRGDSPYQGRGDSPYQGRGDSPYQGRGDSPYQGRGDSPYQGRGDSPYQGRGDSPYQGRGDSPYQGRGDSPYQGRGDSPYQGRGDSPYQGRGDSPYQGRGDSPYQGRGDSPYQGRGDSPYQGRGDSPYQGRGDSPYQGRGDSPYQGRGDSPYQGRGDSPYQGRGDSPYQGRGDSPYQGRGDSPYQGRGDSPYQGRGDSPYQGRGDSPYQGRGDSPYQGRGDSPYQGRGDSPYQGRGDSPYQGRGDSPYQGRGDSPYQGRGDSPYQGRGDSPYQGRGDSPYQGRGDSPYQGRGDSPYQGRGDSPYQGRGDSPYQGRGDSPYQGRGDSPYQGRGDSPYQGRGDSPYQGRGDSPYQGRGDSPYQGRGDSPYQGRGDSPYQGRGDSPYQGRGDSPYQGRGDSPYQGRGDSPYQGRGDSPYQGRGDSPYQGRGDSPYQGRGDSPYQGRGDSPYQGRGDSPYQGRGDSPYQGRGDSPYQGRGDSPYQGRGDSPYQGRGDSPYQGRGDSPYQGRGDSPYQGRGDSPYQGRGDSPYQGRGDSPYQGRGDSPYQGRGDSPYQGRGDSPYQGRGDSPYQGRGDSPYQGRGDSPYQGRGDSPYQGRGDSPYQGRGDSPYQGRGDSPYQGRGDSPYQGRGDSPYQGRGDSPYQGRGDSPYQGRGDSPYQGRGDSPYQGRGDSPYQGRGDSPYQGRGDSPYQGRGDSPYQGRGDSPYQGRGDSPYQGRGDSPYQGRGDSPYQGRGDSPYQGRGDSPYQGRGDSPYQGRGDSPYQGRGDSPYQGRGDSPYQGRGDSPYQGRGDSPYQGRGDSPYQGRGDSPYQGRGDSPYQGRGDSPYQGRGDSPYQGRGDSPYQGRGDSPYQGRGDSPYQGRGDSPYQGRGDSPYQGRGDSPYQGRGDSPYQGRGDSPYQGRGDSPYQGRGDSPYQGRGDSPYQGRGDSPYQGRGDSPYQGRGDSPYQGRGDSPYQGRGDSPYQGRGDSPYQGRGDSPYQGRGDSPYQGRGDSPYQGRGDSPYQGRGDSPYQGRGDSPYQGRGDSPYQGRGDSPYQGRGDSPYQGRGDSPYQGRGDSPYQGRGDSPYQGRGDSPYQGRGDSPYQGRGDSPYQGRGDSPYQGRGDSPYQGRGDSPYQGRGDSPYQGRGDSPYQGRGDSPYQGRGDSPYQGRGDSPYQGRGDSPYQGRGDSPYQGRGDSPYQGRGDSPYQGRGDSPYQGRGDSPYQGRGDSPYQGRGDSPYQGRGDSPYQGRGDSPYQGRGDSPYQGRGDSPYQGRGDSPYQGRGDSPYQGRGDSPYQGRGDSPYQGRGDSPYQGRGDSPYQGRGDSPYQGRGDSPYQGRGDSPYQGRGDSPYQGRGDSPYQGRGDSPYQGRGDSPYQGRGDSPYQGRGDSPYQGRGDSPYQGRGDSPYQGRGDSPYQGRGDSPYQGRGDSPYQGRGDSPYQGRGDSPYQGRGDSPYQGRGDSPYQGRGDSPYQGRGDSPYQGRGDSPYQGRGDSPYQGRGDSPYQGRGDSPYQGRGDSPYQGRGDSPYQGRGDSPYQGRGDSPYQGRGDSPYQGRGDSPYQGRGDSPYQGRGDSPYQGRGDSPYQGRGDSPYQGRGDSPYQGRGDSPYQGRGDSPYQGRGDSPYQGRGDSPYQGRGDSPYQGRGDSPYQGRGDSPYQGRGDSPYQGRGDSPYQGRGDSPYQGRGDSPYQGRGDSPYQGRGDSPYQGRGDSPYQGRGDSPYQGRGDSPYQGRGDSPYQGRGDSPYQGRGDSPYQGRGDSPYQGRGDSPYQGRGDSPYQGRGDSPYQGRGDSPYQGRGDSPYQGRGDSPYQGRGDSPYQGRGDSPYQGRGDSPYQGRGDSPYQGRGDSPYQGRGDSPYQGRGDSPYQGRGDSPYQGRGDSPYQGRGDSPYQGRGDSPYQGRGDSPYQGRGDSPYQGRGDSPYQGRGDSPYQGRGDSPYQGRGDSPYQGRGDSPYQGRGDSPYQGRGDSPYQGRGDSPYQGRGDSPYQGRGDSPYQGRGDSPYQGRGDSPYQGRGDSPYQGRGDSPYQGRGDSPYQGRGDSPYQGRGDSPYQGRGDSPYQGRGDSPYQGRGDSPYQGRGDSPYQGRGDSPYQGRGDSPYQGRGDSPYQGRGDSPYQGRGDSPYQGRGDSPYQGRGDSPYQGRGDSPYQGRGDSPYQGRGDSPYQGRGDSPYQGRGDSPYQGRGDSPYQGRGDSPYQGRGDSPYQGRGDSPYQGRGDSPYQGRGDSPYQGRGDSPYQGRGDSPYQGRGDSPYQGRGDSPYQGRGDSPYQGRGDSPYQGRGDSPYQGRGDSPYQGRGDSPYQGRGDSPYQGRGDSPYQGRGDSPYQGRGDSPYQGRGDSPYQGRGDSPYQGRGDSPYQGRGDSPYQGRGDSPYQGRGDSPYQGRGDSPYQGRGDSPYQGRGDSPYQGRGDSPYQGRGDSPYQGRGDSPYQGRGDSPYQGRGDSPYQGRGDSPYQ

SEQ ID NO: 9 - protein, 4000 aa, Artificial Sequence
  resilin-like polypeptide
  SITE (9)..(4000): May be present or absent in groups of the repeat unit Gly Arg Gly Asn Ser Pro Tyr Gly
GRGNSPYGGRGNSPYGGRGNSPYGGRGNSPYGGRGNSPYGGRGNSPYGGRGNSPYGGRGNSPYGGRGNSPYGGRGNSPYGGRGNSPYGGRGNSPYGGRGNSPYGGRGNSPYGGRGNSPYGGRGNSPYGGRGNSPYGGRGNSPYGGRGNSPYGGRGNSPYGGRGNSPYGGRGNSPYGGRGNSPYGGRGNSPYGGRGNSPYGGRGNSPYGGRGNSPYGGRGNSPYGGRGNSPYGGRGNSPYGGRGNSPYGGRGNSPYGGRGNSPYGGRGNSPYGGRGNSPYGGRGNSPYGGRGNSPYGGRGNSPYGGRGNSPYGGRGNSPYGGRGNSPYGGRGNSPYGGRGNSPYGGRGNSPYGGRGNSPYGGRGNSPYGGRGNSPYGGRGNSPYGGRGNSPYGGRGNSPYGGRGNSPYGGRGNSPYGGRGNSPYGGRGNSPYGGRGNSPYGGRGNSPYGGRGNSPYGGRGNSPYGGRGNSPYGGRGNSPYGGRGNSPYGGRGNSPYGGRGNSPYGGRGNSPYGGRGNSPYGGRGNSPYGGRGNSPYGGRGNSPYGGRGNSPYGGRGNSPYGGRGNSPYGGRGNSPYGGRGNSPYGGRGNSPYGGRGNSPYGGRGNSPYGGRGNSPYGGRGNSPYGGRGNSPYGGRGNSPYGGRGNSPYGGRGNSPYGGRGNSPYGGRGNSPYGGRGNSPYGGRGNSPYGGRGNSPYGGRGNSPYGGRGNSPYGGRGNSPYGGRGNSPYGGRGNSPYGGRGNSPYGGRGNSPYGGRGNSPYGGRGNSPYGGRGNSPYGGRGNSPYGGRGNSPYGGRGNSPYGGRGNSPYGGRGNSPYGGRGNSPYGGRGNSPYGGRGNSPYGGRGNSPYGGRGNSPYGGRGNSPYGGRGNSPYGGRGNSPYGGRGNSPYGGRGNSPYGGRGNSPYGGRGNSPYGGRGNSPYGGRGNSPYGGRGNSPYGGRGNSPYGGRGNSPYGGRGNSPYGGRGNSPYGGRGNSPYGGRGNSPYGGRGNSPYGGRGNSPYGGRGNSPYGGRGNSPYGGRGNSPYGGRGNSPYGGRGNSPYGGRGNSPYGGRGNSPYGGRGNSPYGGRGNSPYGGRGNSPYGGRGNSPYGGRGNSPYGGRGNSPYGGRGNSPYGGRGNSPYGGRGNSPYGGRGNSPYGGRGNSPYGGRGNSPYGGRGNSPYGGRGNSPYGGRGNSPYGGRGNSPYGGRGNSPYGGRGNSPYGGRGNSPYGGRGNSPYGGRGNSPYGGRGNSPYGGRGNSPYGGRGNSPYGGRGNSPYGGRGNSPYGGRGNSPYGGRGNSPYGGRGNSPYGGRGNSPYGGRGNSPYGGRGNSPYGGRGNSPYGGRGNSPYGGRGNSPYGGRGNSPYGGRGNSPYGGRGNSPYGGRGNSPYGGRGNSPYGGRGNSPYGGRGNSPYGGRGNSPYGGRGNSPYGGRGNSPYGGRGNSPYGGRGNSPYGGRGNSPYGGRGNSPYGGRGNSPYGGRGNSPYGGRGNSPYGGRGNSPYGGRGNSPYGGRGNSPYGGRGNSPYGGRGNSPYGGRGNSPYGGRGNSPYGGRGNSPYGGRGNSPYGGRGNSPYGGRGNSPYGGRGNSPYGGRGNSPYGGRGNSPYGGRGNSPYGGRGNSPYGGRGNSPYGGRGNSPYGGRGNSPYGGRGNSPYGGRGNSPYGGRGNSPYGGRGNSPYGGRGNSPYGGRGNSPYGGRGNSPYGGRGNSPYGGRGNSPYGGRGNSPYGGRGNSPYGGRGNSPYGGRGNSPYGGRGNSPYGGRGNSPYGGRGNSPYGGRGNSPYGGRGNSPYGGRGNSPYGGRGNSPYGGRGNSPYGGRGNSPYGGRGNSPYGGRGNSPYGGRGNSPYGGRGNSPYGGRGNSPYGGRGNSPYGGRGNSPYGGRGNSPYGGRGNSPYGGRGNSPYGGRGNSPYGGRGNSPYGGRGNSPYGGRGNSPYGGRGNSPYGGRGNSPYGGRGNSPYGGRGNSPYGGRGNSPYGGRGNSPYGGRGNSPYGGRGNSPYGGRGNSPYGGRGNSPYGGRGNSPYGGRGNSPYGGRGNSPYGGRGNSPYGGRGNSPYGGRGNSPYGGRGNSPYGGRGNSPYGGRGNSPYGGRGNSPYGGRGNSPYGGRGNSPYGGRGNSPYGGRGNSPYGGRGNSPYGGRGNSPYGGRGNSPYGGRGNSPYGGRGNSPYGGRGNSPYGGRGNSPYGGRGNSPYGGRGNSPYGGRGNSPYGGRGNSPYGGRGNSPYGGRGNSPYGGRGNSPYGGRGNSPYGGRGNSPYGGRGNSPYGGRGNSPYGGRGNSPYGGRGNSPYGGRGNSPYGGRGNSPYGGRGNSPYGGRGNSPYGGRGNSPYGGRGNSPYGGRGNSPYGGRGNSPYGGRGNSPYGGRGNSPYGGRGNSPYGGRGNSPYGGRGNSPYGGRGNSPYGGRGNSPYGGRGNSPYGGRGNSPYGGRGNSPYGGRGNSPYGGRGNSPYGGRGNSPYGGRGNSPYGGRGNSPYGGRGNSPYGGRGNSPYGGRGNSPYGGRGNSPYGGRGNSPYGGRGNSPYGGRGNSPYGGRGNSPYGGRGNSPYGGRGNSPYGGRGNSPYGGRGNSPYGGRGNSPYGGRGNSPYGGRGNSPYGGRGNSPYGGRGNSPYGGRGNSPYGGRGNSPYGGRGNSPYGGRGNSPYGGRGNSPYGGRGNSPYGGRGNSPYGGRGNSPYGGRGNSPYGGRGNSPYGGRGNSPYGGRGNSPYGGRGNSPYGGRGNSPYGGRGNSPYGGRGNSPYGGRGNSPYGGRGNSPYGGRGNSPYGGRGNSPYGGRGNSPYGGRGNSPYGGRGNSPYGGRGNSPYGGRGNSPYGGRGNSPYGGRGNSPYGGRGNSPYGGRGNSPYGGRGNSPYGGRGNSPYGGRGNSPYGGRGNSPYGGRGNSPYGGRGNSPYGGRGNSPYGGRGNSPYGGRGNSPYGGRGNSPYGGRGNSPYGGRGNSPYGGRGNSPYGGRGNSPYGGRGNSPYGGRGNSPYGGRGNSPYGGRGNSPYGGRGNSPYGGRGNSPYGGRGNSPYGGRGNSPYGGRGNSPYGGRGNSPYGGRGNSPYGGRGNSPYGGRGNSPYGGRGNSPYGGRGNSPYGGRGNSPYGGRGNSPYGGRGNSPYGGRGNSPYGGRGNSPYGGRGNSPYGGRGNSPYGGRGNSPYGGRGNSPYGGRGNSPYGGRGNSPYGGRGNSPYGGRGNSPYGGRGNSPYGGRGNSPYGGRGNSPYGGRGNSPYGGRGNSPYGGRGNSPYGGRGNSPYGGRGNSPYGGRGNSPYGGRGNSPYGGRGNSPYGGRGNSPYGGRGNSPYGGRGNSPYGGRGNSPYGGRGNSPYGGRGNSPYGGRGNSPYGGRGNSPYGGRGNSPYGGRGNSPYGGRGNSPYGGRGNSPYGGRGNSPYGGRGNSPYGGRGNSPYGGRGNSPYGGRGNSPYGGRGNSPYGGRGNSPYGGRGNSPYGGRGNSPYGGRGNSPYGGRGNSPYGGRGNSPYGGRGNSPYGGRGNSPYGGRGNSPYGGRGNSPYGGRGNSPYGGRGNSPYGGRGNSPYGGRGNSPYGGRGNSPYGGRGNSPYGGRGNSPYGGRGNSPYGGRGNSPYGGRGNSPYGGRGNSPYGGRGNSPYGGRGNSPYGGRGNSPYGGRGNSPYGGRGNSPYGGRGNSPYGGRGNSPYGGRGNSPYGGRGNSPYGGRGNSPYGGRGNSPYGGRGNSPYGGRGNSPYGGRGNSPYGGRGNSPYGGRGNSPYGGRGNSPYGGRGNSPYGGRGNSPYGGRGNSPYGGRGNSPYGGRGNSPYGGRGNSPYGGRGNSPYGGRGNSPYGGRGNSPYGGRGNSPYGGRGNSPYGGRGNSPYGGRGNSPYGGRGNSPYGGRGNSPYGGRGNSPYGGRGNSPYGGRGNSPYGGRGNSPYGGRGNSPYGGRGNSPYGGRGNSPYGGRGNSPYGGRGNSPYGGRGNSPYGGRGNSPYGGRGNSPYGGRGNSPYGGRGNSPYGGRGNSPYGGRGNSPYGGRGNSPYGGRGNSPYGGRGNSPYGGRGNSPYGGRGNSPYGGRGNSPYGGRGNSPYGGRGNSPYG

SEQ ID NO: 10 - protein, 2500 aa, Artificial Sequence
  elastin-like polypeptide
  SITE (4)..(4): Xaa can be any naturally occurring amino acid
  SITE (6)..(2500): May be present or absent in groups of the repeat unit Val Pro Gly Xaa Gly
  SITE (9)..(9): Xaa can be any naturally occurring amino acid
  SITE (14)..(14): Xaa can be any naturally occurring amino acid
  SITE (19)..(19): Xaa can be any naturally occurring amino acid
  SITE (24)..(24): Xaa can be any naturally occurring amino acid
  SITE (29)..(29): Xaa can be any naturally occurring amino acid
  SITE (34)..(34): Xaa can be any naturally occurring amino acid
  SITE (39)..(39): Xaa can be any naturally occurring amino acid
  SITE (44)..(44): Xaa can be any naturally occurring amino acid
  SITE (49)..(49): Xaa can be any naturally occurring amino acid
  SITE (54)..(54): Xaa can be any naturally occurring amino acid
  SITE (59)..(59): Xaa can be any naturally occurring amino acid
  SITE (64)..(64): Xaa can be any naturally occurring amino acid
  SITE (69)..(69): Xaa can be any naturally occurring amino acid
  SITE (74)..(74): Xaa can be any naturally occurring amino acid
  SITE (79)..(79): Xaa can be any naturally occurring amino acid
  SITE (84)..(84): Xaa can be any naturally occurring amino acid
  SITE (89)..(89): Xaa can be any naturally occurring amino acid
  SITE (94)..(94): Xaa can be any naturally occurring amino acid
  SITE (99)..(99): Xaa can be any naturally occurring amino acid
  SITE (104)..(104): Xaa can be any naturally occurring amino acid
  SITE (109)..(109): Xaa can be any naturally occurring amino acid
  SITE (114)..(114): Xaa can be any naturally occurring amino acid
  SITE (119)..(119): Xaa can be any naturally occurring amino acid
  SITE (124)..(124): Xaa can be any naturally occurring amino acid
  SITE (129)..(129): Xaa can be any naturally occurring amino acid
  SITE (134)..(134): Xaa can be any naturally occurring amino acid
  SITE (139)..(139): Xaa can be any naturally occurring amino acid
  SITE (144)..(144): Xaa can be any naturally occurring amino acid
  SITE (149)..(149): Xaa can be any naturally occurring amino acid
  SITE (154)..(154): Xaa can be any naturally occurring amino acid
  SITE (159)..(159): Xaa can be any naturally occurring amino acid
  SITE (164)..(164): Xaa can be any naturally occurring amino acid
  SITE (169)..(169): Xaa can be any naturally occurring amino acid
  SITE (174)..(174): Xaa can be any naturally occurring amino acid
  SITE (179)..(179): Xaa can be any naturally occurring amino acid
  SITE (184)..(184): Xaa can be any naturally occurring amino acid
  SITE (189)..(189): Xaa can be any naturally occurring amino acid
  SITE (194)..(194): Xaa can be any naturally occurring amino acid
  SITE (199)..(199): Xaa can be any naturally occurring amino acid
  SITE (204)..(204): Xaa can be any naturally occurring amino acid
  SITE (209)..(209): Xaa can be any naturally occurring amino acid
  SITE (214)..(214): Xaa can be any naturally occurring amino acid
  SITE (219)..(219): Xaa can be any naturally occurring amino acid
  SITE (224)..(224): Xaa can be any naturally occurring amino acid
  SITE (229)..(229): Xaa can be any naturally occurring amino acid
  SITE (234)..(234): Xaa can be any naturally occurring amino acid
  SITE (239)..(239): Xaa can be any naturally occurring amino acid
  SITE (244)..(244): Xaa can be any naturally occurring amino acid
  SITE (249)..(249): Xaa can be any naturally occurring amino acid
  SITE (254)..(254): Xaa can be any naturally occurring amino acid
  SITE (259)..(259): Xaa can be any naturally occurring amino acid
  SITE (264)..(264): Xaa can be any naturally occurring amino acid
  SITE (269)..(269): Xaa can be any naturally occurring amino acid
  SITE (274)..(274): Xaa can be any naturally occurring amino acid
  SITE (279)..(279): Xaa can be any naturally occurring amino acid
  SITE (284)..(284): Xaa can be any naturally occurring amino acid
  SITE (289)..(289): Xaa can be any naturally occurring amino acid
  SITE (294)..(294): Xaa can be any naturally occurring amino acid
  SITE (299)..(299): Xaa can be any naturally occurring amino acid
  SITE (304)..(304): Xaa can be any naturally occurring amino acid
  SITE (309)..(309): Xaa can be any naturally occurring amino acid
  SITE (314)..(314): Xaa can be any naturally occurring amino acid
  SITE (319)..(319): Xaa can be any naturally occurring amino acid
  SITE (324)..(324): Xaa can be any naturally occurring amino acid
  SITE (329)..(329): Xaa can be any naturally occurring amino acid
  SITE (334)..(334): Xaa can be any naturally occurring amino acid
  SITE (339)..(339): Xaa can be any naturally occurring amino acid
  SITE (344)..(344): Xaa can be any naturally occurring amino acid
  SITE (349)..(349): Xaa can be any naturally occurring amino acid
  SITE (354)..(354): Xaa can be any naturally occurring amino acid
  SITE (359)..(359): Xaa can be any naturally occurring amino acid
  SITE (364)..(364): Xaa can be any naturally occurring amino acid
  SITE (369)..(369): Xaa can be any naturally occurring amino acid
  SITE (374)..(374): Xaa can be any naturally occurring amino acid
  SITE (379)..(379): Xaa can be any naturally occurring amino acid
  SITE (384)..(384): Xaa can be any naturally occurring amino acid
  SITE (389)..(389): Xaa can be any naturally occurring amino acid
  SITE (394)..(394): Xaa can be any naturally occurring amino acid
  SITE (399)..(399): Xaa can be any naturally occurring amino acid
  SITE (404)..(404): Xaa can be any naturally occurring amino acid
  SITE (409)..(409): Xaa can be any naturally occurring amino acid
  SITE (414)..(414): Xaa can be any naturally occurring amino acid
  SITE (419)..(419): Xaa can be any naturally occurring amino acid
  SITE (424)..(424): Xaa can be any naturally occurring amino acid
  SITE (429)..(429): Xaa can be any naturally occurring amino acid
  SITE (434)..(434): Xaa can be any naturally occurring amino acid
  SITE (439)..(439): Xaa can be any naturally occurring amino acid
  SITE (444)..(444): Xaa can be any naturally occurring amino acid
  SITE (449)..(449): Xaa can be any naturally occurring amino acid
  SITE (454)..(454): Xaa can be any naturally occurring amino acid
  SITE (459)..(459): Xaa can be any naturally occurring amino acid
  SITE (464)..(464): Xaa can be any naturally occurring amino acid
  SITE (469)..(469): Xaa can be any naturally occurring amino acid
  SITE (474)..(474): Xaa can be any naturally occurring amino acid
  SITE (479)..(479): Xaa can be any naturally occurring amino acid
  SITE (484)..(484): Xaa can be any naturally occurring amino acid
  SITE (489)..(489): Xaa can be any naturally occurring amino acid
  SITE (494)..(494): Xaa can be any naturally occurring amino acid
  SITE (499)..(499): Xaa can be any naturally occurring amino acid
  SITE (504)..(504): Xaa can be any naturally occurring amino acid
  SITE (509)..(509): Xaa can be any naturally occurring amino acid
  SITE (514)..(514): Xaa can be any naturally occurring amino acid
  SITE (519)..(519): Xaa can be any naturally occurring amino acid
  SITE (524)..(524): Xaa can be any naturally occurring amino acid
  SITE (529)..(529): Xaa can be any naturally occurring amino acid
  SITE (534)..(534): Xaa can be any naturally occurring amino acid
  SITE (539)..(539): Xaa can be any naturally occurring amino acid
  SITE (544)..(544): Xaa can be any naturally occurring amino acid
  SITE (549)..(549): Xaa can be any naturally occurring amino acid
  SITE (554)..(554): Xaa can be any naturally occurring amino acid
  SITE (559)..(559): Xaa can be any naturally occurring amino acid
  SITE (564)..(564): Xaa can be any naturally occurring amino acid
  SITE (569)..(569): Xaa can be any naturally occurring amino acid
  SITE (574)..(574): Xaa can be any naturally occurring amino acid
  SITE (579)..(579): Xaa can be any naturally occurring amino acid
  SITE (584)..(584): Xaa can be any naturally occurring amino acid
  SITE (589)..(589): Xaa can be any naturally occurring amino acid
  SITE (594)..(594): Xaa can be any naturally occurring amino acid
  SITE (599)..(599): Xaa can be any naturally occurring amino acid
  SITE (604)..(604): Xaa can be any naturally occurring amino acid
  SITE (609)..(609): Xaa can be any naturally occurring amino acid
  SITE (614)..(614): Xaa can be any naturally occurring amino acid
  SITE (619)..(619): Xaa can be any naturally occurring amino acid
  SITE (624)..(624): Xaa can be any naturally occurring amino acid
  SITE (629)..(629): Xaa can be any naturally occurring amino acid
  SITE (634)..(634): Xaa can be any naturally occurring amino acid
  SITE (639)..(639): Xaa can be any naturally occurring amino acid
  SITE (644)..(644): Xaa can be any naturally occurring amino acid
  SITE (649)..(649): Xaa can be any naturally occurring amino acid
  SITE (654)..(654): Xaa can be any naturally occurring amino acid
  SITE (659)..(659): Xaa can be any naturally occurring amino acid
  SITE (664)..(664): Xaa can be any naturally occurring amino acid
  SITE (669)..(669): Xaa can be any naturally occurring amino acid
  SITE (674)..(674): Xaa can be any naturally occurring amino acid
  SITE (679)..(679): Xaa can be any naturally occurring amino acid
  SITE (684)..(684): Xaa can be any naturally occurring amino acid
  SITE (689)..(689): Xaa can be any naturally occurring amino acid
  SITE (694)..(694): Xaa can be any naturally occurring amino acid
  SITE (699)..(699): Xaa can be any naturally occurring amino acid
  SITE (704)..(704): Xaa can be any naturally occurring amino acid
  SITE (709)..(709): Xaa can be any naturally occurring amino acid
  SITE (714)..(714): Xaa can be any naturally occurring amino acid
  SITE (719)..(719): Xaa can be any naturally occurring amino acid
  SITE (724)..(724): Xaa can be any naturally occurring amino acid
  SITE (729)..(729): Xaa can be any naturally occurring amino acid
  SITE (734)..(734): Xaa can be any naturally occurring amino acid
  SITE (739)..(739): Xaa can be any naturally occurring amino acid
  SITE (744)..(744): Xaa can be any naturally occurring amino acid
  SITE (749)..(749): Xaa can be any naturally occurring amino acid
  SITE (754)..(754): Xaa can be any naturally occurring amino acid
  SITE (759)..(759): Xaa can be any naturally occurring amino acid
  SITE (764)..(764): Xaa can be any naturally occurring amino acid
  SITE (769)..(769): Xaa can be any naturally occurring amino acid
  SITE (774)..(774): Xaa can be any naturally occurring amino acid
  SITE (779)..(779): Xaa can be any naturally occurring amino acid
  SITE (784)..(784): Xaa can be any naturally occurring amino acid
  SITE (789)..(789): Xaa can be any naturally occurring amino acid
  SITE (794)..(794): Xaa can be any naturally occurring amino acid
  SITE (799)..(799): Xaa can be any naturally occurring amino acid
  SITE (804)..(804): Xaa can be any naturally occurring amino acid
  SITE (809)..(809): Xaa can be any naturally occurring amino acid
  SITE (814)..(814): Xaa can be any naturally occurring amino acid
  SITE (819)..(819): Xaa can be any naturally occurring amino acid
  SITE (824)..(824): Xaa can be any naturally occurring amino acid
  SITE (829)..(829): Xaa can be any naturally occurring amino acid
  SITE (834)..(834): Xaa can be any naturally occurring amino acid
  SITE (839)..(839): Xaa can be any naturally occurring amino acid
  SITE (844)..(844): Xaa can be any naturally occurring amino acid
  SITE (849)..(849): Xaa can be any naturally occurring amino acid
  SITE (854)..(854): Xaa can be any naturally occurring amino acid
  SITE (859)..(859): Xaa can be any naturally occurring amino acid
  SITE (864)..(864): Xaa can be any naturally occurring amino acid
  SITE (869)..(869): Xaa can be any naturally occurring amino acid
  SITE (874)..(874): Xaa can be any naturally occurring amino acid
  SITE (879)..(879): Xaa can be any naturally occurring amino acid
  SITE (884)..(884): Xaa can be any naturally occurring amino acid
  SITE (889)..(889): Xaa can be any naturally occurring amino acid
  SITE (894)..(894): Xaa can be any naturally occurring amino acid
  SITE (899)..(899): Xaa can be any naturally occurring amino acid
  SITE (904)..(904): Xaa can be any naturally occurring amino acid
  SITE (909)..(909): Xaa can be any naturally occurring amino acid
  SITE (914)..(914): Xaa can be any naturally occurring amino acid
  SITE (919)..(919): Xaa can be any naturally occurring amino acid
  SITE (924)..(924): Xaa can be any naturally occurring amino acid
  SITE (929)..(929): Xaa can be any naturally occurring amino acid
  SITE (934)..(934): Xaa can be any naturally occurring amino acid
  SITE (939)..(939): Xaa can be any naturally occurring amino acid
  SITE (944)..(944): Xaa can be any naturally occurring amino acid
  SITE (949)..(949): Xaa can be any naturally occurring amino acid
  SITE (954)..(954): Xaa can be any naturally occurring amino acid
  SITE (959)..(959): Xaa can be any naturally occurring amino acid
  SITE (964)..(964): Xaa can be any naturally occurring amino acid
  SITE (969)..(969): Xaa can be any naturally occurring amino acid
  SITE (974)..(974): Xaa can be any naturally occurring amino acid
  SITE (979)..(979): Xaa can be any naturally occurring amino acid
  SITE (984)..(984): Xaa can be any naturally occurring amino acid
  SITE (989)..(989): Xaa can be any naturally occurring amino acid
  SITE (994)..(994): Xaa can be any naturally occurring amino acid
  SITE (999)..(999): Xaa can be any naturally occurring amino acid
  SITE (1004)..(1004): Xaa can be any naturally occurring amino acid
  SITE (1009)..(1009): Xaa can be any naturally occurring amino acid
  SITE (1014)..(1014): Xaa can be any naturally occurring amino acid
  SITE (1019)..(1019): Xaa can be any naturally occurring amino acid
  SITE (1024)..(1024): Xaa can be any naturally occurring amino acid
  SITE (1029)..(1029): Xaa can be any naturally occurring amino acid
  SITE (1034)..(1034): Xaa can be any naturally occurring amino acid
  SITE (1039)..(1039): Xaa can be any naturally occurring amino acid
  SITE (1044)..(1044): Xaa can be any naturally occurring amino acid
  SITE (1049)..(1049): Xaa can be any naturally occurring amino acid
  SITE (1054)..(1054): Xaa can be any naturally occurring amino acid
  SITE (1059)..(1059): Xaa can be any naturally occurring amino acid
  SITE (1064)..(1064): Xaa can be any naturally occurring amino acid
  SITE (1069)..(1069): Xaa can be any naturally occurring amino acid
  SITE (1074)..(1074): Xaa can be any naturally occurring amino acid
  SITE (1079)..(1079): Xaa can be any naturally occurring amino acid
  SITE (1084)..(1084): Xaa can be any naturally occurring amino acid
  SITE (1089)..(1089): Xaa can be any naturally occurring amino acid
  SITE (1094)..(1094): Xaa can be any naturally occurring amino acid
  SITE (1099)..(1099): Xaa can be any naturally occurring amino acid
  SITE (1104)..(1104): Xaa can be any naturally occurring amino acid
  SITE (1109)..(1109): Xaa can be any naturally occurring amino acid
  SITE (1114)..(1114): Xaa can be any naturally occurring amino acid
  SITE (1119)..(1119): Xaa can be any naturally occurring amino acid
  SITE (1124)..(1124): Xaa can be any naturally occurring amino acid
  SITE (1129)..(1129): Xaa can be any naturally occurring amino acid
  SITE (1134)..(1134): Xaa can be any naturally occurring amino acid
  SITE (1139)..(1139): Xaa can be any naturally occurring amino acid
  SITE (1144)..(1144): Xaa can be any naturally occurring amino acid
  SITE (1149)..(1149): Xaa can be any naturally occurring amino acid
  SITE (1154)..(1154): Xaa can be any naturally occurring amino acid
  SITE (1159)..(1159): Xaa can be any naturally occurring amino acid
  SITE (1164)..(1164): Xaa can be any naturally occurring amino acid
  SITE (1169)..(1169): Xaa can be any naturally occurring amino acid
  SITE (1174)..(1174): Xaa can be any naturally occurring amino acid
  SITE (1179)..(1179): Xaa can be any naturally occurring amino acid
  SITE (1184)..(1184): Xaa can be any naturally occurring amino acid
  SITE (1189)..(1189): Xaa can be any naturally occurring amino acid
  SITE (1194)..(1194): Xaa can be any naturally occurring amino acid
  SITE (1199)..(1199): Xaa can be any naturally occurring amino acid
  SITE (1204)..(1204): Xaa can be any naturally occurring amino acid
  SITE (1209)..(1209): Xaa can be any naturally occurring amino acid
  SITE (1214)..(1214): Xaa can be any naturally occurring amino acid
  SITE (1219)..(1219): Xaa can be any naturally occurring amino acid
  SITE (1224)..(1224): Xaa can be any naturally occurring amino acid
  SITE (1229)..(1229): Xaa can be any naturally occurring amino acid
  SITE (1234)..(1234): Xaa can be any naturally occurring amino acid
  SITE (1239)..(1239): Xaa can be any naturally occurring amino acid
  SITE (1244)..(1244): Xaa can be any naturally occurring amino acid
  SITE (1249)..(1249): Xaa can be any naturally occurring amino acid
  SITE (1254)..(1254): Xaa can be any naturally occurring amino acid
  SITE (1259)..(1259): Xaa can be any naturally occurring amino acid
  SITE (1264)..(1264): Xaa can be any naturally occurring amino acid
  SITE (1269)..(1269): Xaa can be any naturally occurring amino acid
  SITE (1274)..(1274): Xaa can be any naturally occurring amino acid
  SITE (1279)..(1279): Xaa can be any naturally occurring amino acid
  SITE (1284)..(1284): Xaa can be any naturally occurring amino acid
  SITE (1289)..(1289): Xaa can be any naturally occurring amino acid
  SITE (1294)..(1294): Xaa can be any naturally occurring amino acid
  SITE (1299)..(1299): Xaa can be any naturally occurring amino acid
  SITE (1304)..(1304): Xaa can be any naturally occurring amino acid
  SITE (1309)..(1309): Xaa can be any naturally occurring amino acid
  SITE (1314)..(1314): Xaa can be any naturally occurring amino acid
  SITE (1319)..(1319): Xaa can be any naturally occurring amino acid
  SITE (1324)..(1324): Xaa can be any naturally occurring amino acid
  SITE (1329)..(1329): Xaa can be any naturally occurring amino acid
  SITE (1334)..(1334): Xaa can be any naturally occurring amino acid
  SITE (1339)..(1339): Xaa can be any naturally occurring amino acid
  SITE (1344)..(1344): Xaa can be any naturally occurring amino acid
  SITE (1349)..(1349): Xaa can be any naturally occurring amino acid
  SITE (1354)..(1354): Xaa can be any naturally occurring amino acid
  SITE (1359)..(1359): Xaa can be any naturally occurring amino acid
  SITE (1364)..(1364): Xaa can be any naturally occurring amino acid
  SITE (1369)..(1369): Xaa can be any naturally occurring amino acid
  SITE (1374)..(1374): Xaa can be any naturally occurring amino acid
  SITE (1379)..(1379): Xaa can be any naturally occurring amino acid
  SITE (1384)..(1384): Xaa can be any naturally occurring amino acid
  SITE (1389)..(1389): Xaa can be any naturally occurring amino acid
  SITE (1394)..(1394): Xaa can be any naturally occurring amino acid
  SITE (1399)..(1399): Xaa can be any naturally occurring amino acid
  SITE (1404)..(1404): Xaa can be any naturally occurring amino acid
  SITE (1409)..(1409): Xaa can be any naturally occurring amino acid
  SITE (1414)..(1414): Xaa can be any naturally occurring amino acid
  SITE (1419)..(1419): Xaa can be any naturally occurring amino acid
  SITE (1424)..(1424): Xaa can be any naturally occurring amino acid
  SITE (1429)..(1429): Xaa can be any naturally occurring amino acid
  SITE (1434)..(1434): Xaa can be any naturally occurring amino acid
  SITE (1439)..(1439): Xaa can be any naturally occurring amino acid
  SITE (1444)..(1444): Xaa can be any naturally occurring amino acid
  SITE (1449)..(1449): Xaa can be any naturally occurring amino acid
  SITE (1454)..(1454): Xaa can be any naturally occurring amino acid
  SITE (1459)..(1459): Xaa can be any naturally occurring amino acid
  SITE (1464)..(1464): Xaa can be any naturally occurring amino acid
  SITE (1469)..(1469): Xaa can be any naturally occurring amino acid
  SITE (1474)..(1474): Xaa can be any naturally occurring amino acid
  SITE (1479)..(1479): Xaa can be any naturally occurring amino acid
  SITE (1484)..(1484): Xaa can be any naturally occurring amino acid
  SITE (1489)..(1489): Xaa can be any naturally occurring amino acid
  SITE (1494)..(1494): Xaa can be any naturally occurring amino acid
  SITE (1499)..(1499): Xaa can be any naturally occurring amino acid
  SITE (1504)..(1504): Xaa can be any naturally occurring amino acid
  SITE (1509)..(1509): Xaa can be any naturally occurring amino acid
  SITE (1514)..(1514): Xaa can be any naturally occurring amino acid
  SITE (1519)..(1519): Xaa can be any naturally occurring amino acid
  SITE (1524)..(1524): Xaa can be any naturally occurring amino acid
  SITE (1529)..(1529): Xaa can be any naturally occurring amino acid
  SITE (1534)..(1534): Xaa can be any naturally occurring amino acid
  SITE (1539)..(1539): Xaa can be any naturally occurring amino acid
  SITE (1544)..(1544): Xaa can be any naturally occurring amino acid
  SITE (1549)..(1549): Xaa can be any naturally occurring amino acid
  SITE (1554)..(1554): Xaa can be any naturally occurring amino acid
  SITE (1559)..(1559): Xaa can be any naturally occurring amino acid
  SITE (1564)..(1564): Xaa can be any naturally occurring amino acid
  SITE (1569)..(1569): Xaa can be any naturally occurring amino acid
  SITE (1574)..(1574): Xaa can be any naturally occurring amino acid
  SITE (1579)..(1579): Xaa can be any naturally occurring amino acid
  SITE (1584)..(1584): Xaa can be any naturally occurring amino acid
  SITE (1589)..(1589): Xaa can be any naturally occurring amino acid
  SITE (1594)..(1594): Xaa can be any naturally occurring amino acid
  SITE (1599)..(1599): Xaa can be any naturally occurring amino acid
  SITE (1604)..(1604): Xaa can be any naturally occurring amino acid
  SITE (1609)..(1609): Xaa can be any naturally occurring amino acid
  SITE (1614)..(1614): Xaa can be any naturally occurring amino acid
  SITE (1619)..(1619): Xaa can be any naturally occurring amino acid
  SITE (1624)..(1624): Xaa can be any naturally occurring amino acid
  SITE (1629)..(1629): Xaa can be any naturally occurring amino acid
  SITE (1634)..(1634): Xaa can be any naturally occurring amino acid
  SITE (1639)..(1639): Xaa can be any naturally occurring amino acid
  SITE (1644)..(1644): Xaa can be any naturally occurring amino acid
  SITE (1649)..(1649): Xaa can be any naturally occurring amino acid
  SITE (1654)..(1654): Xaa can be any naturally occurring amino acid
  SITE (1659)..(1659): Xaa can be any naturally occurring amino acid
  SITE (1664)..(1664): Xaa can be any naturally occurring amino acid
  SITE (1669)..(1669): Xaa can be any naturally occurring amino acid
  SITE (1674)..(1674): Xaa can be any naturally occurring amino acid
  SITE (1679)..(1679): Xaa can be any naturally occurring amino acid
  SITE (1684)..(1684): Xaa can be any naturally occurring amino acid
  SITE (1689)..(1689): Xaa can be any naturally occurring amino acid
  SITE (1694)..(1694): Xaa can be any naturally occurring amino acid
  SITE (1699)..(1699): Xaa can be any naturally occurring amino acid
  SITE (1704)..(1704): Xaa can be any naturally occurring amino acid
  SITE (1709)..(1709): Xaa can be any naturally occurring amino acid
  SITE (1714)..(1714): Xaa can be any naturally occurring amino acid
  SITE (1719)..(1719): Xaa can be any naturally occurring amino acid
  SITE (1724)..(1724): Xaa can be any naturally occurring amino acid
  SITE (1729)..(1729): Xaa can be any naturally occurring amino acid
  SITE (1734)..(1734): Xaa can be any naturally occurring amino acid
  SITE (1739)..(1739): Xaa can be any naturally occurring amino acid
  SITE (1744)..(1744): Xaa can be any naturally occurring amino acid
  SITE (1749)..(1749): Xaa can be any naturally occurring amino acid
  SITE (1754)..(1754): Xaa can be any naturally occurring amino acid
  SITE (1759)..(1759): Xaa can be any naturally occurring amino acid
  SITE (1764)..(1764): Xaa can be any naturally occurring amino acid
  SITE (1769)..(1769): Xaa can be any naturally occurring amino acid
  SITE (1774)..(1774): Xaa can be any naturally occurring amino acid
  SITE (1779)..(1779): Xaa can be any naturally occurring amino acid
  SITE (1784)..(1784): Xaa can be any naturally occurring amino acid
  SITE (1789)..(1789): Xaa can be any naturally occurring amino acid
  SITE (1794)..(1794): Xaa can be any naturally occurring amino acid
  SITE (1799)..(1799): Xaa can be any naturally occurring amino acid
  SITE (1804)..(1804): Xaa can be any naturally occurring amino acid
  SITE (1809)..(1809): Xaa can be any naturally occurring amino acid
  SITE (1814)..(1814): Xaa can be any naturally occurring amino acid
  SITE (1819)..(1819): Xaa can be any naturally occurring amino acid
  SITE (1824)..(1824): Xaa can be any naturally occurring amino acid
  SITE (1829)..(1829): Xaa can be any naturally occurring amino acid
  SITE (1834)..(1834): Xaa can be any naturally occurring amino acid
  SITE (1839)..(1839): Xaa can be any naturally occurring amino acid
  SITE (1844)..(1844): Xaa can be any naturally occurring amino acid
  SITE (1849)..(1849): Xaa can be any naturally occurring amino acid
  SITE (1854)..(1854): Xaa can be any naturally occurring amino acid
  SITE (1859)..(1859): Xaa can be any naturally occurring amino acid
  SITE (1864)..(1864): Xaa can be any naturally occurring amino acid
  SITE (1869)..(1869): Xaa can be any naturally occurring amino acid
  SITE (1874)..(1874): Xaa can be any naturally occurring amino acid
  SITE (1879)..(1879): Xaa can be any naturally occurring amino acid
  SITE (1884)..(1884): Xaa can be any naturally occurring amino acid
  SITE (1889)..(1889): Xaa can be any naturally occurring amino acid
  SITE (1894)..(1894): Xaa can be any naturally occurring amino acid
  SITE (1899)..(1899): Xaa can be any naturally occurring amino acid
  SITE (1904)..(1904): Xaa can be any naturally occurring amino acid
  SITE (1909)..(1909): Xaa can be any naturally occurring amino acid
  SITE (1914)..(1914): Xaa can be any naturally occurring amino acid
  SITE (1919)..(1919): Xaa can be any naturally occurring amino acid
  SITE (1924)..(1924): Xaa can be any naturally occurring amino acid
  SITE (1929)..(1929): Xaa can be any naturally occurring amino acid
  SITE (1934)..(1934): Xaa can be any naturally occurring amino acid
  SITE (1939)..(1939): Xaa can be any naturally occurring amino acid
  SITE (1944)..(1944): Xaa can be any naturally occurring amino acid
  SITE (1949)..(1949): Xaa can be any naturally occurring amino acid
  SITE (1954)..(1954): Xaa can be any naturally occurring amino acid
  SITE (1959)..(1959): Xaa can be any naturally occurring amino acid
  SITE (1964)..(1964): Xaa can be any naturally occurring amino acid
  SITE (1969)..(1969): Xaa can be any naturally occurring amino acid
  SITE (1974)..(1974): Xaa can be any naturally occurring amino acid
  SITE (1979)..(1979): Xaa can be any naturally occurring amino acid
  SITE (1984)..(1984): Xaa can be any naturally occurring amino acid
  SITE (1989)..(1989): Xaa can be any naturally occurring amino acid
  SITE (1994)..(1994): Xaa can be any naturally occurring amino acid
  SITE (1999)..(1999): Xaa can be any naturally occurring amino acid
  SITE (2004)..(2004): Xaa can be any naturally occurring amino acid
  SITE (2009)..(2009): Xaa can be any naturally occurring amino acid
  SITE (2014)..(2014): Xaa can be any naturally occurring amino acid
  SITE (2019)..(2019): Xaa can be any naturally occurring amino acid
  SITE (2024)..(2024): Xaa can be any naturally occurring amino acid
  SITE (2029)..(2029): Xaa can be any naturally occurring amino acid
  SITE (2034)..(2034): Xaa can be any naturally occurring amino acid
  SITE (2039)..(2039): Xaa can be any naturally occurring amino acid
  SITE (2044)..(2044): Xaa can be any naturally occurring amino acid
  SITE (2049)..(2049): Xaa can be any naturally occurring amino acid
  SITE (2054)..(2054): Xaa can be any naturally occurring amino acid
  SITE (2059)..(2059): Xaa can be any naturally occurring amino acid
  SITE (2064)..(2064): Xaa can be any naturally occurring amino acid
  SITE (2069)..(2069): Xaa can be any naturally occurring amino acid
  SITE (2074)..(2074): Xaa can be any naturally occurring amino acid
  SITE (2079)..(2079): Xaa can be any naturally occurring amino acid
  SITE (2084)..(2084): Xaa can be any naturally occurring amino acid
  SITE (2089)..(2089): Xaa can be any naturally occurring amino acid
  SITE (2094)..(2094): Xaa can be any naturally occurring amino acid
  SITE (2099)..(2099): Xaa can be any naturally occurring amino acid
  SITE (2104)..(2104): Xaa can be any naturally occurring amino acid
  SITE (2109)..(2109): Xaa can be any naturally occurring amino acid
  SITE (2114)..(2114): Xaa can be any naturally occurring amino acid
  SITE (2119)..(2119): Xaa can be any naturally occurring amino acid
  SITE (2124)..(2124): Xaa can be any naturally occurring amino acid
  SITE (2129)..(2129): Xaa can be any naturally occurring amino acid
  SITE (2134)..(2134): Xaa can be any naturally occurring amino acid
  SITE (2139)..(2139): Xaa can be any naturally occurring amino acid
  SITE (2144)..(2144): Xaa can be any naturally occurring amino acid
  SITE (2149)..(2149): Xaa can be any naturally occurring amino acid
  SITE (2154)..(2154): Xaa can be any naturally occurring amino acid
  SITE (2159)..(2159): Xaa can be any naturally occurring amino acid
  SITE (2164)..(2164): Xaa can be any naturally occurring amino acid
  SITE (2169)..(2169): Xaa can be any naturally occurring amino acid
  SITE (2174)..(2174): Xaa can be any naturally occurring amino acid
  SITE (2179)..(2179): Xaa can be any naturally occurring amino acid
  SITE (2184)..(2184): Xaa can be any naturally occurring amino acid
  SITE (2189)..(2189): Xaa can be any naturally occurring amino acid
  SITE (2194)..(2194): Xaa can be any naturally occurring amino acid
  SITE (2199)..(2199): Xaa can be any naturally occurring amino acid
  SITE (2204)..(2204): Xaa can be any naturally occurring amino acid
  SITE (2209)..(2209): Xaa can be any naturally occurring amino acid
  SITE (2214)..(2214): Xaa can be any naturally occurring amino acid
  SITE (2219)..(2219): Xaa can be any naturally occurring amino acid
  SITE (2224)..(2224): Xaa can be any naturally occurring amino acid
  SITE (2229)..(2229): Xaa can be any naturally occurring amino acid
  SITE (2234)..(2234): Xaa can be any naturally occurring amino acid
  SITE (2239)..(2239): Xaa can be any naturally occurring amino acid
  SITE (2244)..(2244): Xaa can be any naturally occurring amino acid
  SITE (2249)..(2249): Xaa can be any naturally occurring amino acid
  SITE (2254)..(2254): Xaa can be any naturally occurring amino acid
  SITE (2259)..(2259): Xaa can be any naturally occurring amino acid
  SITE (2264)..(2264): Xaa can be any naturally occurring amino acid
  SITE (2269)..(2269): Xaa can be any naturally occurring amino acid
  SITE (2274)..(2274): Xaa can be any naturally occurring amino acid
  SITE (2279)..(2279): Xaa can be any naturally occurring amino acid
  SITE (2284)..(2284): Xaa can be any naturally occurring amino acid
  SITE (2289)..(2289): Xaa can be any naturally occurring amino acid
  SITE (2294)..(2294): Xaa can be any naturally occurring amino acid
  SITE (2299)..(2299): Xaa can be any naturally occurring amino acid
  SITE (2304)..(2304): Xaa can be any naturally occurring amino acid
  SITE (2309)..(2309): Xaa can be any naturally occurring amino acid
  SITE (2314)..(2314): Xaa can be any naturally occurring amino acid
  SITE (2319)..(2319): Xaa can be any naturally occurring amino acid
  SITE (2324)..(2324): Xaa can be any naturally occurring amino acid
  SITE (2329)..(2329): Xaa can be any naturally occurring amino acid
  SITE (2334)..(2334): Xaa can be any naturally occurring amino acid
  SITE (2339)..(2339): Xaa can be any naturally occurring amino acid
  SITE (2344)..(2344): Xaa can be any naturally occurring amino acid
  SITE (2349)..(2349): Xaa can be any naturally occurring amino acid
  SITE (2354)..(2354): Xaa can be any naturally occurring amino acid
  SITE (2359)..(2359): Xaa can be any naturally occurring amino acid
  SITE (2364)..(2364): Xaa can be any naturally occurring amino acid
  SITE (2369)..(2369): Xaa can be any naturally occurring amino acid
  SITE (2374)..(2374): Xaa can be any naturally occurring amino acid
  SITE (2379)..(2379): Xaa can be any naturally occurring amino acid
  SITE (2384)..(2384): Xaa can be any naturally occurring amino acid
  SITE (2389)..(2389): Xaa can be any naturally occurring amino acid
  SITE (2394)..(2394): Xaa can be any naturally occurring amino acid
  SITE (2399)..(2399): Xaa can be any naturally occurring amino acid
  SITE (2404)..(2404): Xaa can be any naturally occurring amino acid
  SITE (2409)..(2409): Xaa can be any naturally occurring amino acid
  SITE (2414)..(2414): Xaa can be any naturally occurring amino acid
  SITE (2419)..(2419): Xaa can be any naturally occurring amino acid
  SITE (2424)..(2424): Xaa can be any naturally occurring amino acid
  SITE (2429)..(2429): Xaa can be any naturally occurring amino acid
  SITE (2434)..(2434): Xaa can be any naturally occurring amino acid
  SITE (2439)..(2439): Xaa can be any naturally occurring amino acid
  SITE (2444)..(2444): Xaa can be any naturally occurring amino acid
  SITE (2449)..(2449): Xaa can be any naturally occurring amino acid
  SITE (2454)..(2454): Xaa can be any naturally occurring amino acid
  SITE (2459)..(2459): Xaa can be any naturally occurring amino acid
  SITE (2464)..(2464): Xaa can be any naturally occurring amino acid
  SITE (2469)..(2469): Xaa can be any naturally occurring amino acid
  SITE (2474)..(2474): Xaa can be any naturally occurring amino acid
  SITE (2479)..(2479): Xaa can be any naturally occurring amino acid
  SITE (2484)..(2484): Xaa can be any naturally occurring amino acid
  SITE (2489)..(2489): Xaa can be any naturally occurring amino acid
  SITE (2494)..(2494): Xaa can be any naturally occurring amino acid
  SITE (2499)..(2499): Xaa can be any naturally occurring amino acid
VPGXGVPGXGVPGXGVPGXGVPGXGVPGXGVPGXGVPGXGVPGXGVPGXGVPGXGVPGXGVPGXGVPGXGVPGXGVPGXGVPGXGVPGXGVPGXGVPGXGVPGXGVPGXGVPGXGVPGXGVPGXGVPGXGVPGXGVPGXGVPGXGVPGXGVPGXGVPGXGVPGXGVPGXGVPGXGVPGXGVPGXGVPGXGVPGXGVPGXGVPGXGVPGXGVPGXGVPGXGVPGXGVPGXGVPGXGVPGXGVPGXGVPGXGVPGXGVPGXGVPGXGVPGXGVPGXGVPGXGVPGXGVPGXGVPGXGVPGXGVPGXGVPGXGVPGXGVPGXGVPGXGVPGXGVPGXGVPGXGVPGXGVPGXGVPGXGVPGXGVPGXGVPGXGVPGXGVPGXGVPGXGVPGXGVPGXGVPGXGVPGXGVPGXGVPGXGVPGXGVPGXGVPGXGVPGXGVPGXGVPGXGVPGXGVPGXGVPGXGVPGXGVPGXGVPGXGVPGXGVPGXGVPGXGVPGXGVPGXGVPGXGVPGXGVPGXGVPGXGVPGXGVPGXGVPGXGVPGXGVPGXGVPGXGVPGXGVPGXGVPGXGVPGXGVPGXGVPGXGVPGXGVPGXGVPGXGVPGXGVPGXGVPGXGVPGXGVPGXGVPGXGVPGXGVPGXGVPGXGVPGXGVPGXGVPGXGVPGXGVPGXGVPGXGVPGXGVPGXGVPGXGVPGXGVPGXGVPGXGVPGXGVPGXGVPGXGVPGXGVPGXGVPGXGVPGXGVPGXGVPGXGVPGXGVPGXGVPGXGVPGXGVPGXGVPGXGVPGXGVPGXGVPGXGVPGXGVPGXGVPGXGVPGXGVPGXGVPGXGVPGXGVPGXGVPGXGVPGXGVPGXGVPGXGVPGXGVPGXGVPGXGVPGXGVPGXGVPGXGVPGXGVPGXGVPGXGVPGXGVPGXGVPGXGVPGXGVPGXGVPGXGVPGXGVPGXGVPGXGVPGXGVPGXGVPGXGVPGXGVPGXGVPGXGVPGXGVPGXGVPGXGVPGXGVPGXGVPGXGVPGXGVPGXGVPGXGVPGXGVPGXGVPGXGVPGXGVPGXGVPGXGVPGXGVPGXGVPGXGVPGXGVPGXGVPGXGVPGXGVPGXGVPGXGVPGXGVPGXGVPGXGVPGXGVPGXGVPGXGVPGXGVPGXGVPGXGVPGXGVPGXGVPGXGVPGXGVPGXGVPGXGVPGXGVPGXGVPGXGVPGXGVPGXGVPGXGVPGXGVPGXGVPGXGVPGXGVPGXGVPGXGVPGXGVPGXGVPGXGVPGXGVPGXGVPGXGVPGXGVPGXGVPGXGVPGXGVPGXGVPGXGVPGXGVPGXGVPGXGVPGXGVPGXGVPGXGVPGXGVPGXGVPGXGVPGXGVPGXGVPGXGVPGXGVPGXGVPGXGVPGXGVPGXGVPGXGVPGXGVPGXGVPGXGVPGXGVPGXGVPGXGVPGXGVPGXGVPGXGVPGXGVPGXGVPGXGVPGXGVPGXGVPGXGVPGXGVPGXGVPGXGVPGXGVPGXGVPGXGVPGXGVPGXGVPGXGVPGXGVPGXGVPGXGVPGXGVPGXGVPGXGVPGXGVPGXGVPGXGVPGXGVPGXGVPGXGVPGXGVPGXGVPGXGVPGXGVPGXGVPGXGVPGXGVPGXGVPGXGVPGXGVPGXGVPGXGVPGXGVPGXGVPGXGVPGXGVPGXGVPGXGVPGXGVPGXGVPGXGVPGXGVPGXGVPGXGVPGXGVPGXGVPGXGVPGXGVPGXGVPGXGVPGXGVPGXGVPGXGVPGXGVPGXGVPGXGVPGXGVPGXGVPGXGVPGXGVPGXGVPGXGVPGXGVPGXGVPGXGVPGXGVPGXGVPGXGVPGXGVPGXGVPGXGVPGXGVPGXGVPGXGVPGXGVPGXGVPGXGVPGXGVPGXGVPGXGVPGXGVPGXGVPGXGVPGXGVPGXGVPGXGVPGXGVPGXGVPGXGVPGXGVPGXGVPGXGVPGXGVPGXGVPGXGVPGXGVPGXGVPGXGVPGXGVPGXGVPGXGVPGXGVPGXGVPGXGVPGXGVPGXGVPGXGVPGXGVPGXGVPGXGVPGXGVPGXGVPGXGVPGXGVPGXGVPGXGVPGXGVPGXGVPGXGVPGXGVPGXGVPGXGVPGXGVPGXGVPGXGVPGXGVPGXGVPGXGVPGXGVPGXGVPGXGVPGXGVPGXGVPGXGVPGXGVPGXGVPGXGVPGXGVPGXGVPGXGVPGXGVPGXGVPGXGVPGXGVPGXGVPGXGVPGXGVPGXGVPGXGVPGXGVPGXGVPGXGVPGXGVPGXGVPGXGVPGXGVPGXGVPGXGVPGXGVPGXGVPGXGVPGXGVPGXGVPGXGVPGXGVPGXGVPGXGVPGXGVPGXGVPGXGVPGXGVPGXGVPGXGVPGXGVPGXGVPGXGVPGXGVPGXGVPGXGVPGXGVPGXGVPGXGVPGXGVPGXGVPGXGVPGXGVPGXGVPGXGVPGXGVPGXGVPGXGVPGXGVPGXGVPGXGVPGXGVPGXGVPGXGVPGXGVPGXGVPGXGVPGXGVPGXGVPGXGVPGXGVPGXGVPGXGVPGXGVPGXGVPGXG

SEQ ID NO: 11 - protein, 2500 aa, Artificial Sequence
  elastin-like polypeptide
  SITE (6)..(2500): May be present or absent in groups of the repeat unit Gly Val Gly Val Pro
GVGVPGVGVPGVGVPGVGVPGVGVPGVGVPGVGVPGVGVPGVGVPGVGVPGVGVPGVGVPGVGVPGVGVPGVGVPGVGVPGVGVPGVGVPGVGVPGVGVPGVGVPGVGVPGVGVPGVGVPGVGVPGVGVPGVGVPGVGVPGVGVPGVGVPGVGVPGVGVPGVGVPGVGVPGVGVPGVGVPGVGVPGVGVPGVGVPGVGVPGVGVPGVGVPGVGVPGVGVPGVGVPGVGVPGVGVPGVGVPGVGVPGVGVPGVGVPGVGVPGVGVPGVGVPGVGVPGVGVPGVGVPGVGVPGVGVPGVGVPGVGVPGVGVPGVGVPGVGVPGVGVPGVGVPGVGVPGVGVPGVGVPGVGVPGVGVPGVGVPGVGVPGVGVPGVGVPGVGVPGVGVPGVGVPGVGVPGVGVPGVGVPGVGVPGVGVPGVGVPGVGVPGVGVPGVGVPGVGVPGVGVPGVGVPGVGVPGVGVPGVGVPGVGVPGVGVPGVGVPGVGVPGVGVPGVGVPGVGVPGVGVPGVGVPGVGVPGVGVPGVGVPGVGVPGVGVPGVGVPGVGVPGVGVPGVGVPGVGVPGVGVPGVGVPGVGVPGVGVPGVGVPGVGVPGVGVPGVGVPGVGVPGVGVPGVGVPGVGVPGVGVPGVGVPGVGVPGVGVPGVGVPGVGVPGVGVPGVGVPGVGVPGVGVPGVGVPGVGVPGVGVPGVGVPGVGVPGVGVPGVGVPGVGVPGVGVPGVGVPGVGVPGVGVPGVGVPGVGVPGVGVPGVGVPGVGVPGVGVPGVGVPGVGVPGVGVPGVGVPGVGVPGVGVPGVGVPGVGVPGVGVPGVGVPGVGVPGVGVPGVGVPGVGVPGVGVPGVGVPGVGVPGVGVPGVGVPGVGVPGVGVPGVGVPGVGVPGVGVPGVGVPGVGVPGVGVPGVGVPGVGVPGVGVPGVGVPGVGVPGVGVPGVGVPGVGVPGVGVPGVGVPGVGVPGVGVPGVGVPGVGVPGVGVPGVGVPGVGVPGVGVPGVGVPGVGVPGVGVPGVGVPGVGVPGVGVPGVGVPGVGVPGVGVPGVGVPGVGVPGVGVPGVGVPGVGVPGVGVPGVGVPGVGVPGVGVPGVGVPGVGVPGVGVPGVGVPGVGVPGVGVPGVGVPGVGVPGVGVPGVGVPGVGVPGVGVPGVGVPGVGVPGVGVPGVGVPGVGVPGVGVPGVGVPGVGVPGVGVPGVGVPGVGVPGVGVPGVGVPGVGVPGVGVPGVGVPGVGVPGVGVPGVGVPGVGVPGVGVPGVGVPGVGVPGVGVPGVGVPGVGVPGVGVPGVGVPGVGVPGVGVPGVGVPGVGVPGVGVPGVGVPGVGVPGVGVPGVGVPGVGVPGVGVPGVGVPGVGVPGVGVPGVGVPGVGVPGVGVPGVGVPGVGVPGVGVPGVGVPGVGVPGVGVPGVGVPGVGVPGVGVPGVGVPGVGVPGVGVPGVGVPGVGVPGVGVPGVGVPGVGVPGVGVPGVGVPGVGVPGVGVPGVGVPGVGVPGVGVPGVGVPGVGVPGVGVPGVGVPGVGVPGVGVPGVGVPGVGVPGVGVPGVGVPGVGVPGVGVPGVGVPGVGVPGVGVPGVGVPGVGVPGVGVPGVGVPGVGVPGVGVPGVGVPGVGVPGVGVPGVGVPGVGVPGVGVPGVGVPGVGVPGVGVPGVGVPGVGVPGVGVPGVGVPGVGVPGVGVPGVGVPGVGVPGVGVPGVGVPGVGVPGVGVPGVGVPGVGVPGVGVPGVGVPGVGVPGVGVPGVGVPGVGVPGVGVPGVGVPGVGVPGVGVPGVGVPGVGVPGVGVPGVGVPGVGVPGVGVPGVGVPGVGVPGVGVPGVGVPGVGVPGVGVPGVGVPGVGVPGVGVPGVGVPGVGVPGVGVPGVGVPGVGVPGVGVPGVGVPGVGVPGVGVPGVGVPGVGVPGVGVPGVGVPGVGVPGVGVPGVGVPGVGVPGVGVPGVGVPGVGVPGVGVPGVGVPGVGVPGVGVPGVGVPGVGVPGVGVPGVGVPGVGVPGVGVPGVGVPGVGVPGVGVPGVGVPGVGVPGVGVPGVGVPGVGVPGVGVPGVGVPGVGVPGVGVPGVGVPGVGVPGVGVPGVGVPGVGVPGVGVPGVGVPGVGVPGVGVPGVGVPGVGVPGVGVPGVGVPGVGVPGVGVPGVGVPGVGVPGVGVPGVGVPGVGVPGVGVPGVGVPGVGVPGVGVPGVGVPGVGVPGVGVPGVGVPGVGVPGVGVPGVGVPGVGVPGVGVPGVGVPGVGVPGVGVPGVGVPGVGVPGVGVPGVGVPGVGVPGVGVPGVGVPGVGVPGVGVPGVGVPGVGVPGVGVPGVGVPGVGVPGVGVPGVGVPGVGVPGVGVPGVGVPGVGVPGVGVPGVGVPGVGVPGVGVPGVGVPGVGVPGVGVPGVGVPGVGVPGVGVPGVGVPGVGVPGVGVPGVGVPGVGVPGVGVPGVGVPGVGVPGVGVPGVGVPGVGVPGVGVPGVGVPGVGVPGVGVPGVGVPGVGVPGVGVPGVGVPGVGVPGVGVPGVGVPGVGVPGVGVPGVGVPGVGVPGVGVP

SEQ ID NO: 12 - protein, 625 aa, Artificial Sequence
  elastin-like polypeptide
  SITE (101)..(625): May be present or absent in groups of the repeat unit Gly Val Gly Val Pro Gly Leu Gly Val Pro Gly Val Gly Val Pro Gly Leu Gly Val Pro Gly Val Gly Val Pro
GVGVPGLGVPGVGVPGLGVPGVGVPGVGVPGLGVPGVGVPGLGVPGVGVPGVGVPGLGVPGVGVPGLGVPGVGVPGVGVPGLGVPGVGVPGLGVPGVGVPGVGVPGLGVPGVGVPGLGVPGVGVPGVGVPGLGVPGVGVPGLGVPGVGVPGVGVPGLGVPGVGVPGLGVPGVGVPGVGVPGLGVPGVGVPGLGVPGVGVPGVGVPGLGVPGVGVPGLGVPGVGVPGVGVPGLGVPGVGVPGLGVPGVGVPGVGVPGLGVPGVGVPGLGVPGVGVPGVGVPGLGVPGVGVPGLGVPGVGVPGVGVPGLGVPGVGVPGLGVPGVGVPGVGVPGLGVPGVGVPGLGVPGVGVPGVGVPGLGVPGVGVPGLGVPGVGVPGVGVPGLGVPGVGVPGLGVPGVGVPGVGVPGLGVPGVGVPGLGVPGVGVPGVGVPGLGVPGVGVPGLGVPGVGVPGVGVPGLGVPGVGVPGLGVPGVGVPGVGVPGLGVPGVGVPGLGVPGVGVPGVGVPGLGVPGVGVPGLGVPGVGVPGVGVPGLGVPGVGVPGLGVPGVGVPGVGVPGLGVPGVGVPGLGVPGVGVPGVGVPGLGVPGVGVPGLGVPGVGVPGVGVPGLGVPGVGVPGLGVPGVGVP

SEQ ID NO: 13 - protein, 625 aa, Artificial Sequence
  elastin-like polypeptide
  SITE (101)..(625): May be present or absent in groups of the repeat unit Gly Val Gly Val Pro Gly Val Gly Val Pro Gly Ala Gly Val Pro Gly Val Gly Val Pro Gly Val Gly Val Pro
GVGVPGVGVPGAGVPGVGVPGVGVPGVGVPGVGVPGAGVPGVGVPGVGVPGVGVPGVGVPGAGVPGVGVPGVGVPGVGVPGVGVPGAGVPGVGVPGVGVPGVGVPGVGVPGAGVPGVGVPGVGVPGVGVPGVGVPGAGVPGVGVPGVGVPGVGVPGVGVPGAGVPGVGVPGVGVPGVGVPGVGVPGAGVPGVGVPGVGVPGVGVPGVGVPGAGVPGVGVPGVGVPGVGVPGVGVPGAGVPGVGVPGVGVPGVGVPGVGVPGAGVPGVGVPGVGVPGVGVPGVGVPGAGVPGVGVPGVGVPGVGVPGVGVPGAGVPGVGVPGVGVPGVGVPGVGVPGAGVPGVGVPGVGVPGVGVPGVGVPGAGVPGVGVPGVGVPGVGVPGVGVPGAGVPGVGVPGVGVPGVGVPGVGVPGAGVPGVGVPGVGVPGVGVPGVGVPGAGVPGVGVPGVGVPGVGVPGVGVPGAGVPGVGVPGVGVPGVGVPGVGVPGAGVPGVGVPGVGVPGVGVPGVGVPGAGVPGVGVPGVGVPGVGVPGVGVPGAGVPGVGVPGVGVPGVGVPGVGVPGAGVPGVGVPGVGVPGVGVPGVGVPGAGVPGVGVPGVGVPGVGVPGVGVPGAGVPGVGVPGVGVP

SEQ ID NO: 14 - protein, 625 aa, Artificial Sequence
  elastin-like polypeptide
  SITE (101)..(625): May be present or absent in groups of the repeat unit Gly Val Gly Val Pro Gly Trp Gly Val Pro Gly Val Gly Val Pro Gly Trp Gly Val Pro Gly Val Gly Val Pro
GVGVPGWGVPGVGVPGWGVPGVGVPGVGVPGWGVPGVGVPGWGVPGVGVPGVGVPGWGVPGVGVPGWGVPGVGVPGVGVPGWGVPGVGVPGWGVPGVGVPGVGVPGWGVPGVGVPGWGVPGVGVPGVGVPGWGVPGVGVPGWGVPGVGVPGVGVPGWGVPGVGVPGWGVPGVGVPGVGVPGWGVPGVGVPGWGVPGVGVPGVGVPGWGVPGVGVPGWGVPGVGVPGVGVPGWGVPGVGVPGWGVPGVGVPGVGVPGWGVPGVGVPGWGVPGVGVPGVGVPGWGVPGVGVPGWGVPGVGVPGVGVPGWGVPGVGVPGWGVPGVGVPGVGVPGWGVPGVGVPGWGVPGVGVPGVGVPGWGVPGVGVPGWGVPGVGVPGVGVPGWGVPGVGVPGWGVPGVGVPGVGVPGWGVPGVGVPGWGVPGVGVPGVGVPGWGVPGVGVPGWGVPGVGVPGVGVPGWGVPGVGVPGWGVPGVGVPGVGVPGWGVPGVGVPGWGVPGVGVPGVGVPGWGVPGVGVPGWGVPGVGVPGVGVPGWGVPGVGVPGWGVPGVGVPGVGVPGWGVPGVGVPGWGVPGVGVPGVGVPGWGVPGVGVPGWGVPGVGVPGVGVPGWGVPGVGVPGWGVPGVGVP

SEQ ID NO: 15 - protein, 1125 aa, Artificial Sequence
  elastin-like polypeptide
  SITE (181)..(1125): May be present or absent in groups of the repeat unit Gly Val Gly Val Pro Gly Val Gly Val Pro Gly Val Gly Val Pro Gly Val Gly Val Pro Gly Val Gly Val Pro Gly Val Gly Val Pro Gly Glu Gly Val Pro Gly Phe Gly Val Pro Gly Val Gly Val Pro
GVGVPGVGVPGVGVPGVGVPGVGVPGVGVPGEGVPGFGVPGVGVPGVGVPGVGVPGVGVPGVGVPGVGVPGVGVPGEGVPGFGVPGVGVPGVGVPGVGVPGVGVPGVGVPGVGVPGVGVPGEGVPGFGVPGVGVPGVGVPGVGVPGVGVPGVGVPGVGVPGVGVPGEGVPGFGVPGVGVPGVGVPGVGVPGVGVPGVGVPGVGVPGVGVPGEGVPGFGVPGVGVPGVGVPGVGVPGVGVPGVGVPGVGVPGVGVPGEGVPGFGVPGVGVPGVGVPGVGVPGVGVPGVGVPGVGVPGVGVPGEGVPGFGVPGVGVPGVGVPGVGVPGVGVPGVGVPGVGVPGVGVPGEGVPGFGVPGVGVPGVGVPGVGVPGVGVPGVGVPGVGVPGVGVPGEGVPGFGVPGVGVPGVGVPGVGVPGVGVPGVGVPGVGVPGVGVPGEGVPGFGVPGVGVPGVGVPGVGVPGVGVPGVGVPGVGVPGVGVPGEGVPGFGVPGVGVPGVGVPGVGVPGVGVPGVGVPGVGVPGVGVPGEGVPGFGVPGVGVPGVGVPGVGVPGVGVPGVGVPGVGVPGVGVPGEGVPGFGVPGVGVPGVGVPGVGVPGVGVPGVGVPGVGVPGVGVPGEGVPGFGVPGVGVPGVGVPGVGVPGVGVPGVGVPGVGVPGVGVPGEGVPGFGVPGVGVPGVGVPGVGVPGVGVPGVGVPGVGVPGVGVPGEGVPGFGVPGVGVPGVGVPGVGVPGVGVPGVGVPGVGVPGVGVPGEGVPGFGVPGVGVPGVGVPGVGVPGVGVPGVGVPGVGVPGVGVPGEGVPGFGVPGVGVPGVGVPGVGVPGVGVPGVGVPGVGVPGVGVPGEGVPGFGVPGVGVPGVGVPGVGVPGVGVPGVGVPGVGVPGVGVPGEGVPGFGVPGVGVPGVGVPGVGVPGVGVPGVGVPGVGVPGVGVPGEGVPGFGVPGVGVPGVGVPGVGVPGVGVPGVGVPGVGVPGVGVPGEGVPGFGVPGVGVPGVGVPGVGVPGVGVPGVGVPGVGVPGVGVPGEGVPGFGVPGVGVPGVGVPGVGVPGVGVPGVGVPGVGVPGVGVPGEGVPGFGVPGVGVPGVGVPGVGVPGVGVPGVGVPGVGVPGVGVPGEGVPGFGVPGVGVP

SEQ ID NO: 16 - protein, 1125 aa, Artificial Sequence
  elastin-like polypeptide
  SITE (181)..(1125): May be present or absent in groups of the repeat unit Gly Val Gly Val Pro Gly Val Gly Val Pro Gly Val Gly Val Pro Gly Val Gly Val Pro Gly Val Gly Val Pro Gly Val Gly Val Pro Gly Lys Gly Val Pro Gly Phe Gly Val Pro Gly Val Gly Val Pro
GVGVPGVGVPGVGVPGVGVPGVGVPGVGVPGKGVPGFGVPGVGVPGVGVPGVGVPGVGVPGVGVPGVGVPGVGVPGKGVPGFGVPGVGVPGVGVPGVGVPGVGVPGVGVPGVGVPGVGVPGKGVPGFGVPGVGVPGVGVPGVGVPGVGVPGVGVPGVGVPGVGVPGKGVPGFGVPGVGVPGVGVPGVGVPGVGVPGVGVPGVGVPGVGVPGKGVPGFGVPGVGVPGVGVPGVGVPGVGVPGVGVPGVGVPGVGVPGKGVPGFGVPGVGVPGVGVPGVGVPGVGVPGVGVPGVGVPGVGVPGKGVPGFGVPGVGVPGVGVPGVGVPGVGVPGVGVPGVGVPGVGVPGKGVPGFGVPGVGVPGVGVPGVGVPGVGVPGVGVPGVGVPGVGVPGKGVPGFGVPGVGVPGVGVPGVGVPGVGVPGVGVPGVGVPGVGVPGKGVPGFGVPGVGVPGVGVPGVGVPGVGVPGVGVPGVGVPGVGVPGKGVPGFGVPGVGVPGVGVPGVGVPGVGVPGVGVPGVGVPGVGVPGKGVPGFGVPGVGVPGVGVPGVGVPGVGVPGVGVPGVGVPGVGVPGKGVPGFGVPGVGVPGVGVPGVGVPGVGVPGVGVPGVGVPGVGVPGKGVPGFGVPGVGVPGVGVPGVGVPGVGVPGVGVPGVGVPGVGVPGKGVPGFGVPGVGVPGVGVPGVGVPGVGVPGVGVPGVGVPGVGVPGKGVPGFGVPGVGVPGVGVPGVGVPGVGVPGVGVPGVGVPGVGVPGKGVPGFGVPGVGVPGVGVPGVGVPGVGVPGVGVPGVGVPGVGVPGKGVPGFGVPGVGVPGVGVPGVGVPGVGVPGVGVPGVGVPGVGVPGKGVPGFGVPGVGVPGVGVPGVGVPGVGVPGVGVPGVGVPGVGVPGKGVPGFGVPGVGVPGVGVPGVGVPGVGVPGVGVPGVGVPGVGVPGKGVPGFGVPGVGVPGVGVPGVGVPGVGVPGVGVPGVGVPGVGVPGKGVPGFGVPGVGVPGVGVPGVGVPGVGVPGVGVPGVGVPGVGVPGKGVPGFGVPGVGVPGVGVPGVGVPGVGVPGVGVPGVGVPGVGVPGKGVPGFGVPGVGVPGVGVPGVGVPGVGVPGVGVPGVGVPGVGVPGKGVPGFGVPGVGVP

SEQ ID NO: 17 - protein, 625 aa, Artificial Sequence
  elastin-like polypeptide
  SITE (26)..(625): May be present or absent in groups of the repeat unit Gly Ala Gly Val Pro Gly Val Gly Val Pro Gly Ala Gly Val Pro Gly Val Gly Val Pro Gly Ala Gly Val Pro
GAGVPGVGVPGAGVPGVGVPGAGVPGAGVPGVGVPGAGVPGVGVPGAGVPGAGVPGVGVPGAGVPGVGVPGAGVPGAGVPGVGVPGAGVPGVGVPGAGVPGAGVPGVGVPGAGVPGVGVPGAGVPGAGVPGVGVPGAGVPGVGVPGAGVPGAGVPGVGVPGAGVPGVGVPGAGVPGAGVPGVGVPGAGVPGVGVPGAGVPGAGVPGVGVPGAGVPGVGVPGAGVPGAGVPGVGVPGAGVPGVGVPGAGVPGAGVPGVGVPGAGVPGVGVPGAGVPGAGVPGVGVPGAGVPGVGVPGAGVPGAGVPGVGVPGAGVPGVGVPGAGVPGAGVPGVGVPGAGVPGVGVPGAGVPGAGVPGVGVPGAGVPGVGVPGAGVPGAGVPGVGVPGAGVPGVGVPGAGVPGAGVPGVGVPGAGVPGVGVPGAGVPGAGVPGVGVPGAGVPGVGVPGAGVPGAGVPGVGVPGAGVPGVGVPGAGVPGAGVPGVGVPGAGVPGVGVPGAGVPGAGVPGVGVPGAGVPGVGVPGAGVPGAGVPGVGVPGAGVPGVGVPGAGVPGAGVPGVGVPGAGVPGVGVPGAGVPGAGVPGVGVPGAGVPGVGVPGAGVPGAGVPGVGVPGAGVPGVGVPGAGVP

SEQ ID NO: 18 - protein, 100 aa, Artificial Sequence
  Linker peptide
  SITE (6)..(100): May be present or absent in groups of the repeat unit Glu Ala Ala Ala Lys
EAAAKEAAAKEAAAKEAAAKEAAAKEAAAKEAAAKEAAAKEAAAKEAAAKEAAAKEAAAKEAAAKEAAAKEAAAKEAAAKEAAAKEAAAKEAAAKEAAAK

SEQ ID NO: 19 - protein, 150 aa, Artificial Sequence
  Linker peptide
  SITE (6)..(150): May be present or absent in groups of the repeat unit Gly Gly Gly Gly Ser
GGGGSGGGGSGGGGSGGGGSGGGGSGGGGSGGGGSGGGGSGGGGSGGGGSGGGGSGGGGSGGGGSGGGGSGGGGSGGGGSGGGGSGGGGSGGGGSGGGGSGGGGSGGGGSGGGGSGGGGSGGGGSGGGGSGGGGSGGGGSGGGGSGGGGS

SEQ ID NO: 20 - protein, 200 aa, Artificial Sequence
  Linker peptide
  SITE (5)..(100): May be present or absent in groups of the repeat unit Ser Gly Gly Gly
SGGGSGGGSGGGSGGGSGGGSGGGSGGGSGGGSGGGSGGGSGGGSGGGSGGGSGGGSGGGSGGGSGGGSGGGSGGGSGGGSGGGSGGGSGGGSGGGSGGGSGGGSGGGSGGGSGGGSGGGSGGGSGGGSGGGSGGGSGGGSGGGSGGGSGGGSGGGSGGGSGGGSGGGSGGGSGGGSGGGSGGGSGGGSGGGSGGGSGGG

SEQ ID NO: 21 - protein, 80 aa, Artificial Sequence
  Linker peptide
  SITE (5)..(80): May be present or absent in groups of the repeat unit Gly Gly Gly Ser
GGGSGGGSGGGSGGGSGGGSGGGSGGGSGGGSGGGSGGGSGGGSGGGSGGGSGGGSGGGSGGGSGGGSGGGSGGGSGGGS

SEQ ID NO: 22 - protein, 18 aa, Artificial Sequence
  Linker peptide
KESGSVSSEQLAQFRSLD

SEQ ID NO: 23 - protein, 14 aa, Artificial Sequence
  Linker peptide
EGKSSGSGSESKST

SEQ ID NO: 24 - protein, 7 aa, Artificial Sequence
  AAV linker
PRKNRPP

SEQ ID NO: 25 - protein, 5 aa, Artificial Sequence
  AAV linker
VDYPP

SEQ ID NO: 26 - protein, 5 aa, Artificial Sequence
  AAV linker
NNKPP

SEQ ID NO: 27 - protein, 5 aa, Artificial Sequence
  AAV linker
INKPP

SEQ ID NO: 28 - protein, 90 aa, Artificial Sequence
  Human PKD1
SAGESVQITLPKNEVQLNAYVLQEPPKGETYTYDWQLITHPRDYSGEMEGKHSQILKLSKLTPGLYEFKVIVEGQNAHGEGYVNVTVKPE

SEQ ID NO: 29 - protein, 90 aa, Artificial Sequence
  Human PKD2
IAIVSPQFQEISLPTTSTVIDGSQSTDDDKIVQYHWEELKGPLREEKISEDTAILKLSKLVPGNYTFSLTVVDSDGATNSTTANLTVNKA

SEQ ID NO: 30 - protein, 91 aa, Artificial Sequence
  Human PKD3
VANAGPNQVITLPQNSITLFGNQSTDDHGITSYEWSLSPSSKGKVVEMQGVRTPTLQLSAMQEGDYTYQLTVTDTIGQQATAQVTVIVQPE

SEQ ID NO: 31 - protein, 89 aa, Artificial Sequence
  Human PKD4
QADAGPDKELTLPVDSTTLDGSKSSDDQKIISYLWEKTQGPDGVQLENANSSVATVTGLQVGTYVFTLTVKDERNLQSQSSVNVIVKEE

SEQ ID NO: 32 - protein, 92 aa, Artificial Sequence
  Human PKD5
IAKITGNVVITLPTSTAELDGSKSSDDKGIVSYLWTRDEGSPAAGEVLNHSDHHPILFLSNLVEGTYTFHLKVTDAKGESDTDRTTVEVKPD

SEQ ID NO: 33 - protein, 477 aa, Homo sapiens
VSAGESVQITLPKNEVQLNAYVLQEPPKGETYTYDWQLITHPRDYSGEMEGKHSQILKLSKLTPGLYEFKVIVEGQNAHGEGYVNVTVKPEPRKNRPPIAIVSPQFQEISLPTTSTVIDGSQSTDDDKIVQYHWEELKGPLREEKISEDTAILKLSKLVPGNYTFSLTVVDSDGATNSTTANLTVNKAVDYPPVANAGPNQVITLPQNSITLFGNQSTDDHGITSYEWSLSPSSKGKVVEMQGVRTPTLQLSAMQEGDYTYQLTVTDTIGQQATAQVTVIVQPENNKPPQADAGPDKELTLPVDSTTLDGSKSSDDQKIISYLWEKTQGPDGVQLENANSSVATVTGLQVGTYVFTLTVKDERNLQSQSSVNVIVKEEINKPPIAKITGNVVITLPTSTAELDGSKSSDDKGIVSYLWTRDEGSPAAGEVLNHSDHHPILFLSNLVEGTYTFHLKVTDAKGESDTDRTTVEVKPDPR

SEQ ID NO: 34 - protein, 478 aa, Homo sapiens
MVSAGESVQITLPKNEVQLNAYVLQEPPKGETYTYDWQLITHPRDYSGEMEGKHSQILKLSKLTPGLYEFKVIVEGQNAHGEGYVNVTVKPEPRKNRPPIAIVSPQFQEISLPTTSTVIDGSQSTDDDKIVQYHWEELKGPLREEKISEDTAILKLSKLVPGNYTFSLTVVDSDGATNSTTANLTVNKAVDYPPVANAGPNQVITLPQNSITLFGNQSTDDHGITSYEWSLSPSSKGKVVEMQGVRTPTLQLSAMQEGDYTYQLTVTDTIGQQATAQVTVIVQPENNKPPQADAGPDKELTLPVDSTTLDGSKSSDDQKIISYLWEKTQGPDGVQLENANSSVATVTGLQVGTYVFTLTVKDERNLQSQSSVNVIVKEEINKPPIAKITGNVVITLPTSTAELDGSKSSDDKGIVSYLWTRDEGSPAAGEVLNHSDHHPILFLSNLVEGTYTFHLKVTDAKGESDTDRTTVEVKPDPR

SEQ ID NO: 35 - protein, 1049 aa, Homo sapiens
MEKRLGVKPNPASWILSGYYWQTSAKWLRSLYLFYTCFCFSVLWLSTDASESRCQQGKTQFGVGLRSGGENHLWLLEGTPSLQSCWAACCQDSACHVFWWLEGMCIQADCSRPQSCRAFRTHSSNSMLVFLKKFQTADDLGFLPEDDVPHLLGLGWNWASWRQSPPRAALRPAVSSSDQQSLIRKLQKRGSPSDVVTPIVTQHSKVNDSNELGGLTTSGSAEVHKAITISSPLTTDLTAELSGGPKNVSVQPEISEGLATTPSTQQVKSSEKTQIAVPQPVAPSYSYATPTPQASFQSTSAPYPVIKELVVSAGESVQITLPKNEVQLNAYVLQEPPKGETYTYDWQLITHPRDYSGEMEGKHSQILKLSKLTPGLYEFKVIVEGQNAHGEGYVNVTVKPEPRKNRPPIAIVSPQFQEISLPTTSTVIDGSQSTDDDKIVQYHWEELKGPLREEKISEDTAILKLSKLVPGNYTFSLTVVDSDGATNSTTANLTVNKAVDYPPVANAGPNQVITLPQNSITLFGNQSTDDHGITSYEWSLSPSSKGKVVEMQGVRTPTLQLSAMQEGDYTYQLTVTDTIGQQATAQVTVIVQPENNKPPQADAGPDKELTLPVDSTTLDGSKSSDDQKIISYLWEKTQGPDGVQLENANSSVATVTGLQVGTYVFTLTVKDERNLQSQSSVNVIVKEEINKPPIAKITGNVVITLPTSTAELDGSKSSDDKGIVSYLWTRDEGSPAAGEVLNHSDHHPILFLSNLVEGTYTFHLKVTDAKGESDTDRTTVEVKPDPRKNNLVEIILDINVSQLTERLKGMFIRQIGVLLGVLDSDIIVQKIQPYTEQSTKMVFFVQNEPPHQIFKGHEVAAMLKSELRKQKADFLIFRALEVNTVTCQLNCSDHGHCDSFTKRCICDPFWMENFIKVQLRDGDSNCEWSVLYVIIATFVIVVALGILSWTVICCCKRQKGKPKRKSKYKILDATDQESLELKPTSRAGIKQKGLLLSSSLMHSESELDSDDAIFTWPDREKGKLLHGQNGSVPNGQTPLKARSPREEIL

SEQ ID NO: 36 - protein, 1048 aa, Mus musculus
MEKRLGVKPSPASWVLPGYCWQTSVKLPRSLYLLYSFFCFSVLWLSTDADESRCQQGKTLYGAGLRTEGENHLRLLAGSLPFHACRAACCRDSACHALWWLEGMCFQADCSKPQSCQPFRTDSSNSMLIIFQKSQTTDDLGLLPEDDEPHLLRLGWGRTSWRRQSLLGAPLTLSVPSSHHQSLLRDRQKRDLSVVPTHGAMQHSKVNHSEEAGALSPTSAEVRKTITVAGSFTSNHTTQTPEWPKNVSIHPEPSEHSSPVSGTPQVKSTEHSPTDAPLPVAPSYSYATPTPQASSQSTSAPHPVVKELVVSAGKSVQITLPKNEVQLNAFVLPEAEPGETYTYDWQLITHPTDYSGEVERKHSQSLQLSKLTPGLYEFKVTVDGQNAHGEGYVNVTVKPEPRKNRPPVAVVSPQFQEISLPTTSTIIDGSQSTDDDKIVQYHWEELKGPLREEKISEDTAILKLSKLVPGNYTFSLTVVDSDGATNSTTASLTVNKAVDYPPVANAGPNQVITLPQNSITLFGNQSTDDHGITSYEWSLSPSSKGKVVEMQGVRTPALQLSAMQEGDYTYQLTVTDTAGQQATAQVTVIVQPENNKPPQADAGPDKELTLPVDSTTLDGSKSTDDQRVVSYLWEQSRGPDGVQLENANSSVATVTGLQVGTYVFTLTVKDERNLQSQSSVNVIVKEEINKPPVAKIAGNVVVTLPTSTAELDGSRSSDDKGIVSYLWTRDETSPAAGEVLNHSDHHPVLFLSNLVEGTYTFHLKVTDAKGESDTDRTTVEVKPDPRKSNLVEIILDVNVSQLTERLKGMLIRQIGVLLGVLDSDIIVQKIQPYTEQSTKMLFFVQNDPPHQLFKGHEVAAMLKSELQKQKADFLIFRALEISTVTCQLNCSDHGHCDSFTKRCVCDPFWMENFIKVQLRDGDSNCEWSVLYVIIASFVIVVALGILSWTTICCCKRQKGKPKRKSRYKILDATDQESLELKPTSRAGSKQKGPTLSSSLMHSESELDSDDAIFTWPDREKGKLLYGQNGSVPNGQTPLKSRSAREEIL

SEQ ID NO: 37 - protein, 92 aa, Artificial Sequence
  Mouse PKD1
VVSAGKSVQITLPKNEVQLNAFVLPEAEPGETYTYDWQLITHPTDYSGEVERKHSQSLQLSKLTPGLYEFKVTVDGQNAHGEGYVNVTVKPE

SEQ ID NO: 38 - protein, 90 aa, Artificial Sequence
  Mouse PKD2
VAVVSPQFQEISLPTTSTIIDGSQSTDDDKIVQYHWEELKGPLREEKISEDTAILKLSKLVPGNYTFSLTVVDSDGATNSTTASLTVNKA

SEQ ID NO: 39 - protein, 91 aa, Artificial Sequence
  Mouse PKD3
VANAGPNQVITLPQNSITLFGNQSTDDHGITSYEWSLSPSSKGKVVEMQGVRTPALQLSAMQEGDYTYQLTVTDTAGQQATAQVTVIVQPE

SEQ ID NO: 40 - protein, 89 aa, Artificial Sequence
  Mouse PKD4
QADAGPDKELTLPVDSTTLDGSKSTDDQRVVSYLWEQSRGPDGVQLENANSSVATVTGLQVGTYVFTLTVKDERNLQSQSSVNVIVKEE

SEQ ID NO: 41 - protein, 92 aa, Artificial Sequence
  Mouse PKD5
VAKIAGNVVVTLPTSTAELDGSRSSDDKGIVSYLWTRDETSPAAGEVLNHSDHHPVLFLSNLVEGTYTFHLKVTDAKGESDTDRTTVEVKPD

SEQ ID NO: 42 - protein, 1049 aa, Unknown
  Pongo sp.
MEKRLGVKPNPASWILSGYYWQTSAKWLRTLYLFYTCFCFSVLWLSTDASESRCQQGKTQFGVGLRSGGENHLWLLEGTPSLQSCWAACCQDSACHVFWWLEGMCIQADCSRPQSCRAFRTHSSNSMLMFLKKFQTADDLGFLPEDDVPHLLGLGWNWASWRQSPPRAALRPAVSSSDQQSLIRKLQKRGSPSEVVTPIVTQHSKVNDSNELGGLTTSGSAEVHKAITISSPLTTDLTAELPGGPKNVSAQPEIPEGLATTPSTQQVKSSEKTQIAVPQPVAPSYSYGTPTPQASFQSTSAPYPVIKELVVSAGDSVQITLPKNEVQLNAYVLQEPPKGETYTYDWQLITHPRDYSGEMEGKHSQILKLSKLTPGLYEFKVIVEGQNAHGEGYVNVTVKPEPRKNRPPIAIVSPQFQEISLPTTSTVIDGSQSTDDDKIVQYHWEELKGPLREEKISEDTAILKLSKLVPGNYTFSLTVVDSDGATNSTTANLTVNKAVDYPPVANAGPNQVITLPQNSITLFGNQSTDDHGITSYEWSLSPSSKGKVVEMQGVRTPTLQLSAMQEGDYTYQLTVTDTIGQQATAQVTVIVQPENNKPPQADAGPDKELTLPVDSTTLDGSKSSDDQKIISYLWEKTQGPDGVQLENANSSIATVTGLQVGTYVFTLTVKDERNLQSQSSVNVIVKEEINKPPIAKITGNVVITLPTSTAELDGSKSSDDKGIVSYLWTRDEGSPAAGEVLNHSDHHPILFLSNLVEGTYTFHLKVTDAKGESDTDRTTVEVKPDPRKNNLVEIILDINVSQLTERLKGMFIRQIGVLLGVLDSDIIVQKIQPYTEQSTKMVFFVQNEPPHQIFKGHEVAAMLKSELRKQKADFLIFRALEINTVTCQLNCSDHGHCDSFTKRCICDPFWMENFIKVQLRDGESNCEWSVLYVIIATFVIVVALGILSWTVICCCKRQKGKPKRKSKYKILDATDQESLELKPTSRTGIKQKGLVLSSSLMHSESELDSDDAIFTWPDREKGKLLHGQNGSVPNGQTPLKARSPREEIL

SEQ ID NO: 43 - protein, 92 aa, Artificial Sequence
  Orangutan PKD1
VVSAGDSVQITLPKNEVQLNAYVLQEPPKGETYTYDWQLITHPRDYSGEMEGKHSQILKLSKLTPGLYEFKVIVEGQNAHGEGYVNVTVKPE

SEQ ID NO: 44 - protein, 90 aa, Artificial Sequence; identical to SEQ ID NO: 29
  Orangutan PKD2

SEQ ID NO: 45 - protein, 91 aa, Artificial Sequence; identical to SEQ ID NO: 30
  Orangutan PKD3

SEQ ID NO: 46 - protein, 89 aa, Artificial Sequence
  Orangutan PKD4
QADAGPDKELTLPVDSTTLDGSKSSDDQKIISYLWEKTQGPDGVQLENANSSIATVTGLQVGTYVFTLTVKDERNLQSQSSVNVIVKEE

SEQ ID NO: 47 - protein, 92 aa, Artificial Sequence; identical to SEQ ID NO: 32
  Orangutan PKD5

SEQ ID NO: 48 - protein, 30 aa, Artificial Sequence
  Linker peptide
  SITE (2)..(30): Each individual Gly may be present or absent
GGGGGGGGGGGGGGGGGGGGGGGGGGGGGG

SEQ ID NO: 49 - protein, 79 aa, Artificial Sequence
  Human MANEC (motif at N terminus with eight cysteines)
ASESRCQQGKTQFGVGLRSGGENHLWLLEGTPSLQSCWAACCQDSACHVFWWLEGMCIQADCSRPQSCRAFRTHSSNSM

SEQ ID NO: 50 - protein, 79 aa, Artificial Sequence
  Mouse MANEC (motif at N terminus with eight cysteines)
ADESRCQQGKTLYGAGLRTEGENHLRLLAGSLPFHACRAACCRDSACHALWWLEGMCFQADCSKPQSCQPFRTDSSNSM

SEQ ID NO: 51 - protein, 79 aa, Artificial Sequence; identical to SEQ ID NO: 49
  Orangutan MANEC (motif at N terminus with eight cysteines)

SEQ ID NO: 52 - protein, 100 aa, Artificial Sequence
  Recombinant PKD2
GNRPPIAIVSPQFQEISLPTTSTVIDGSQSTDDDKIVQYHWEELKGPLREEKISEDTAILKLSKLVPGNYTFSLTVVDSDGATNSTTANLTVNKAVDYPG

SEQ ID NO: 53 - protein, 100 aa, Artificial Sequence
  Recombinant PKD2
GNRPPIAIVSPQFQEISLPTTSTVIDGHQSTDDDKIVQYHWEELKGPLREEKISEDTAILKLSKLVPGNYTFSLTVVDSDGATNSTTANLTVNKAVDYPG

SEQ ID NO: 54 - protein, 100 aa, Artificial Sequence
  Recombinant PKD2
GNRPPIAIVSPQFQEISLPTTSTVIDGSHSTDDDKIVQYHWEELKGPLREEKISEDTAILKLSKLVPGNYTFSLTVVDSDGATNSTTANLTVNKAVDYPG

SEQ ID NO: 55 - protein, 100 aa, Artificial Sequence
  Recombinant PKD2
GNRPPIAIVSPQFQEISLPTTSTVIDGSQSHDDDKIVQYHWEELKGPLREEKISEDTAILKLSKLVPGNYTFSLTVVDSDGATNSTTANLTVNKAVDYPG

SEQ ID NO: 56 - protein, 100 aa, Artificial Sequence
  Recombinant PKD2
GNRPPIAIVSPQFQEISLPTTSTVIDGSQSTDDHKIVQYHWEELKGPLREEKISEDTAILKLSKLVPGNYTFSLTVVDSDGATNSTTANLTVNKAVDYPG

SEQ ID NO: 57 - protein, 100 aa, Artificial Sequence
  Recombinant PKD2
GNRPPIAIVSPQFQEISLPTTSTVIDGSQSTDDDHIVQYHWEELKGPLREEKISEDTAILKLSKLVPGNYTFSLTVVDSDGATNSTTANLTVNKAVDYPG

SEQ ID NO: 58 - protein, 100 aa, Artificial Sequence
  Recombinant PKD2
GNRPPIAIVSPQFQEISLPTTSTVIDGSQSTDDDKHVQYHWEELKGPLREEKISEDTAILKLSKLVPGNYTFSLTVVDSDGATNSTTANLTVNKAVDYPG

SEQ ID NO: 59 - protein, 100 aa, Artificial Sequence
  Recombinant PKD2
GNRPPIAIVSPQFQEISLPTTSTVIDGSQSTDDDKIHQYHWEELKGPLREEKISEDTAILKLSKLVPGNYTFSLTVVDSDGATNSTTANLTVNKAVDYPG

SEQ ID NO: 60 - protein, 100 aa, Artificial Sequence
  Recombinant PKD2
GNRPPIAIVSPQFQEISLPTTSTVIDGSQSTDDDKIVQHHWEELKGPLREEKISEDTAILKLSKLVPGNYTFSLTVVDSDGATNSTTANLTVNKAVDYPG

SEQ ID NO: 61 - protein, 100 aa, Artificial Sequence
  Recombinant PKD2
GNRPPIAIVSPQFQEISLPTTSTVIDGSQSTDDDKIVQYHWEELKGPLREEKISEDTAHLKLSKLVPGNYTFSLTVVDSDGATNSTTANLTVNKAVDYPG

SEQ ID NO: 62 - protein, 100 aa, Artificial Sequence
  Recombinant PKD2
GNRPPIAIVSPQFQEISLPTTSTVIDGSQSTDDDKIHQHHWEELKGPLREEKISEDTAILKLSKLVPGNYTFSLTVVDSDGATNSTTANLTVNKAVDYPG

SEQ ID NO: 63 - protein, 100 aa, Artificial Sequence
  Recombinant PKD2
GNRPPIAIVSPQFQEISLPTTSTVIDGHHSTDDDKIVQYHWEELKGPLREEKISEDTAILKLSKLVPGNYTFSLTVVDSDGATNSTTANLTVNKAVDYPG

SEQ ID NO: 64 - protein, 99 aa, Artificial Sequence
  Recombinant PKD2
GNRPPIAIVSPQFQEISLPTTSTVIDGSQSTDDDKIVQYHWEELKGPLREEKISEDTAILKLSKLVPGNYTFSLTVVDSDGATNSTTANLTVNKAVDYP

SEQ ID NO: 65 - protein, 99 aa, Artificial Sequence
  Recombinant PKD2
GNRPPIAIVSPQFQEISLPTTSTVIDGHQSTDDDKIVQYHWEELKGPLREEKISEDTAILKLSKLVPGNYTFSLTVVDSDGATNSTTANLTVNKAVDYP

SEQ ID NO: 66 - protein, 99 aa, Artificial Sequence
  Recombinant PKD2
GNRPPIAIVSPQFQEISLPTTSTVIDGSHSTDDDKIVQYHWEELKGPLREEKISEDTAILKLSKLVPGNYTFSLTVVDSDGATNSTTANLTVNKAVDYP

SEQ ID NO: 67 - protein, 99 aa, Artificial Sequence
  Recombinant PKD2
GNRPPIAIVSPQFQEISLPTTSTVIDGSQSHDDDKIVQYHWEELKGPLREEKISEDTAILKLSKLVPGNYTFSLTVVDSDGATNSTTANLTVNKAVDYP

SEQ ID NO: 68 - protein, 99 aa, Artificial Sequence
  Recombinant PKD2
GNRPPIAIVSPQFQEISLPTTSTVIDGSQSTDDHKIVQYHWEELKGPLREEKISEDTAILKLSKLVPGNYTFSLTVVDSDGATNSTTANLTVNKAVDYP

SEQ ID NO: 69 - protein, 99 aa, Artificial Sequence
  Recombinant PKD2
GNRPPIAIVSPQFQEISLPTTSTVIDGSQSTDDDHIVQYHWEELKGPLREEKISEDTAILKLSKLVPGNYTFSLTVVDSDGATNSTTANLTVNKAVDYP

SEQ ID NO: 70 - protein, 99 aa, Artificial Sequence
  Recombinant PKD2
GNRPPIAIVSPQFQEISLPTTSTVIDGSQSTDDDKHVQYHWEELKGPLREEKISEDTAILKLSKLVPGNYTFSLTVVDSDGATNSTTANLTVNKAVDYP

SEQ ID NO: 71 - protein, 99 aa, Artificial Sequence
  Recombinant PKD2
GNRPPIAIVSPQFQEISLPTTSTVIDGSQSTDDDKIHQYHWEELKGPLREEKISEDTAILKLSKLVPGNYTFSLTVVDSDGATNSTTANLTVNKAVDYP

SEQ ID NO: 72 - protein, 99 aa, Artificial Sequence
  Recombinant PKD2
GNRPPIAIVSPQFQEISLPTTSTVIDGSQSTDDDKIVQHHWEELKGPLREEKISEDTAILKLSKLVPGNYTFSLTVVDSDGATNSTTANLTVNKAVDYP

SEQ ID NO: 73 - protein, 99 aa, Artificial Sequence
  Recombinant PKD2
GNRPPIAIVSPQFQEISLPTTSTVIDGSQSTDDDKIVQYHWEELKGPLREEKISEDTAHLKLSKLVPGNYTFSLTVVDSDGATNSTTANLTVNKAVDYP

SEQ ID NO: 74 - protein, 99 aa, Artificial Sequence
  Recombinant PKD2
GNRPPIAIVSPQFQEISLPTTSTVIDGSQSTDDDKIHQHHWEELKGPLREEKISEDTAILKLSKLVPGNYTFSLTVVDSDGATNSTTANLTVNKAVDYP

SEQ ID NO: 75 - protein, 99 aa, Artificial Sequence
  Recombinant PKD2
GNRPPIAIVSPQFQEISLPTTSTVIDGHHSTDDDKIVQYHWEELKGPLREEKISEDTAILKLSKLVPGNYTFSLTVVDSDGATNSTTANLTVNKAVDYP

SEQ ID NO: 76 - protein, 90 aa, Artificial Sequence
  Recombinant PKD2
IAIVSPQFQEISLPTTSTVIDGHQSTDDDKIVQYHWEELKGPLREEKISEDTAILKLSKLVPGNYTFSLTVVDSDGATNSTTANLTVNKA

SEQ ID NO: 77 - protein, 90 aa, Artificial Sequence
  Recombinant PKD2
IAIVSPQFQEISLPTTSTVIDGSHSTDDDKIVQYHWEELKGPLREEKISEDTAILKLSKLVPGNYTFSLTVVDSDGATNSTTANLTVNKA

SEQ ID NO: 78 - protein, 90 aa, Artificial Sequence
  Recombinant PKD2
IAIVSPQFQEISLPTTSTVIDGSQSHDDDKIVQYHWEELKGPLREEKISEDTAILKLSKLVPGNYTFSLTVVDSDGATNSTTANLTVNKA

SEQ ID NO: 79 - protein, 90 aa, Artificial Sequence
  Recombinant PKD2
IAIVSPQFQEISLPTTSTVIDGSQSTDDHKIVQYHWEELKGPLREEKISEDTAILKLSKLVPGNYTFSLTVVDSDGATNSTTANLTVNKA

SEQ ID NO: 80 - protein, 90 aa, Artificial Sequence
  Recombinant PKD2
IAIVSPQFQEISLPTTSTVIDGSQSTDDDHIVQYHWEELKGPLREEKISEDTAILKLSKLVPGNYTFSLTVVDSDGATNSTTANLTVNKA

SEQ ID NO: 81 - protein, 90 aa, Artificial Sequence
  Recombinant PKD2
IAIVSPQFQEISLPTTSTVIDGSQSTDDDKHVQYHWEELKGPLREEKISEDTAILKLSKLVPGNYTFSLTVVDSDGATNSTTANLTVNKA

SEQ ID NO: 82 - protein, 90 aa, Artificial Sequence
  Recombinant PKD2
IAIVSPQFQEISLPTTSTVIDGSQSTDDDKIHQYHWEELKGPLREEKISEDTAILKLSKLVPGNYTFSLTVVDSDGATNSTTANLTVNKA

SEQ ID NO: 83 - protein, 90 aa, Artificial Sequence
  Recombinant PKD2
IAIVSPQFQEISLPTTSTVIDGSQSTDDDKIVQHHWEELKGPLREEKISEDTAILKLSKLVPGNYTFSLTVVDSDGATNSTTANLTVNKA

SEQ ID NO: 84 - protein, 90 aa, Artificial Sequence
  Recombinant PKD2
IAIVSPQFQEISLPTTSTVIDGSQSTDDDKIVQYHWEELKGPLREEKISEDTAHLKLSKLVPGNYTFSLTVVDSDGATNSTTANLTVNKA

SEQ ID NO: 85 - protein, 90 aa, Artificial Sequence
  Recombinant PKD2
IAIVSPQFQEISLPTTSTVIDGSQSTDDDKIHQHHWEELKGPLREEKISEDTAILKLSKLVPGNYTFSLTVVDSDGATNSTTANLTVNKA

SEQ ID NO: 86 - protein, 90 aa, Artificial Sequence
  Recombinant PKD2
IAIVSPQFQEISLPTTSTVIDGHHSTDDDKIVQYHWEELKGPLREEKISEDTAILKLSKLVPGNYTFSLTVVDSDGATNSTTANLTVNKA

SEQ ID NO: 87 - protein, 500 aa, Artificial Sequence
  Purification Matrix
GNRPPIAIVSPQFQEISLPTTSTVIDGSQSTDDDKIVQYHWEELKGPLREEKISEDTAILKLSKLVPGNYTFSLTVVDSDGATNSTTANLTVNKAVDYPGVGVPGLGVPGVGVPGLGVPGVGVPGVGVPGLGVPGVGVPGLGVPGVGVPGVGVPGLGVPGVGVPGLGVPGVGVPGVGVPGLGVPGVGVPGLGVPGVGVPGVGVPGLGVPGVGVPGLGVPGVGVPGVGVPGLGVPGVGVPGLGVPGVGVPGVGVPGLGVPGVGVPGLGVPGVGVPGVGVPGLGVPGVGVPGLGVPGVGVPGVGVPGLGVPGVGVPGLGVPGVGVPGVGVPGLGVPGVGVPGLGVPGVGVPGVGVPGLGVPGVGVPGLGVPGVGVPGVGVPGLGVPGVGVPGLGVPGVGVPGVGVPGLGVPGVGVPGLGVPGVGVPGVGVPGLGVPGVGVPGLGVPGVGVPGVGVPGLGVPGVGVPGLGVPGVGVPGVGVPGLGVPGVGVPGLGVPGVGVPG

SEQ ID NO: 88 - protein, 401 aa, Artificial Sequence
  Polypeptide with Phase Behavior
GVGVPGLGVPGVGVPGLGVPGVGVPGVGVPGLGVPGVGVPGLGVPGVGVPGVGVPGLGVPGVGVPGLGVPGVGVPGVGVPGLGVPGVGVPGLGVPGVGVPGVGVPGLGVPGVGVPGLGVPGVGVPGVGVPGLGVPGVGVPGLGVPGVGVPGVGVPGLGVPGVGVPGLGVPGVGVPGVGVPGLGVPGVGVPGLGVPGVGVPGVGVPGLGVPGVGVPGLGVPGVGVPGVGVPGLGVPGVGVPGLGVPGVGVPGVGVPGLGVPGVGVPGLGVPGVGVPGVGVPGLGVPGVGVPGLGVPGVGVPGVGVPGLGVPGVGVPGLGVPGVGVPGVGVPGLGVPGVGVPGLGVPGVGVPGVGVPGLGVPGVGVPGLGVPGVGVPGVGVPGLGVPGVGVPGLGVPGVGVPG

SEQ ID NO: 89 - protein, 5 aa, Artificial Sequence
  AAV-binding polypeptide optional N-terminal sequence
GNRPP

SEQ ID NO: 90 - protein, 5 aa, Artificial Sequence
  AAV-binding polypeptide optional C-terminal sequence
VYDPG

SEQ ID NO: 91 - protein, 4 aa, Artificial Sequence
  AAV-binding polypeptide optional C-terminal sequence
VYDP

SEQ ID NO: 92 - protein, 290 aa, Artificial Sequence
  AAV binding polypeptide
MASVSAGESVQITLPKNEVQLNAYVLQEPPKGETYTYDWQLITHPRDYSGEMEGKHSQILKLSKLTPGLYEFKVIVEGQNAHGEGYVNVTVKPEPRKNRPPIAIVSPQFQEISLPTTSTVIDGSQSTDDDKIVQYHWEELKGPLREEKISEDTAILKLSKLVPGNYTFSLTVVDSDGATNSTTANLTVNKAVDYPPVANAGPNQVITLPQNSITLFGNQSTDDHGITSYEWSLSPSSKGKVVEMQGVRTPTLQLSAMQEGDYTYQLTVTDTIGQQATAQVTVIVQPENNK

SEQ ID NO: 93 - DNA, 300 bp, Artificial Sequence
  Recombinant PKD2
gggaatcgtccgcccatcgctattgtcagccctcaatttcaggagatcagcttgccgacaacctccactgtaattgatggttcccagtcgaccgacgacgataaaatcgtacaataccactgggaggaactcaaggggccgctgcgtgaggaaaagatcagcgaggataccgcaattttgaaacttagtaaactggttcccggcaactacacattttctttaacggttgtagactcggatggtgccaccaactctacgaccgctaatcttacagtgaacaaagcggtcgattatccgggc

SEQ ID NO: 94 - DNA, 300 bp, Artificial Sequence
  Recombinant PKD2
gggaatcgtccgcccatcgctattgtcagccctcaatttcaggagatcagcttgccgacaacctccactgtaattgatggtcatcagtcgaccgacgacgataaaatcgtacaataccactgggaggaactcaaggggccgctgcgtgaggaaaagatcagcgaggataccgcaattttgaaacttagtaaactggttcccggcaactacacattttctttaacggttgtagactcggatggtgccaccaactctacgaccgctaatcttacagtgaacaaagcggtcgattatccgggc

SEQ ID NO: 95 - DNA, 300 bp, Artificial Sequence
  Recombinant PKD2
gggaatcgtccgcccatcgctattgtcagccctcaatttcaggagatcagcttgccgacaacctccactgtaattgatggttcccattcgaccgacgacgataaaatcgtacaataccactgggaggaactcaaggggccgctgcgtgaggaaaagatcagcgaggataccgcaattttgaaacttagtaaactggttcccggcaactacacattttctttaacggttgtagactcggatggtgccaccaactctacgaccgctaatcttacagtgaacaaagcggtcgattatccgggc

SEQ ID NO: 96 - DNA, 300 bp, Artificial Sequence
  Recombinant PKD2
gggaatcgtccgcccatcgctattgtcagccctcaatttcaggagatcagcttgccgacaacctccactgtaattgatggttcccagtcgcatgacgacgataaaatcgtacaataccactgggaggaactcaaggggccgctgcgtgaggaaaagatcagcgaggataccgcaattttgaaacttagtaaactggttcccggcaactacacattttctttaacggttgtagactcggatggtgccaccaactctacgaccgctaatcttacagtgaacaaagcggtcgattatccgggc

SEQ ID NO: 97 - DNA, 300 bp, Artificial Sequence
  Recombinant PKD2
gggaatcgtccgcccatcgctattgtcagccctcaatttcaggagatcagcttgccgacaacctccactgtaattgatggttcccagtcgaccgacgaccataaaatcgtacaataccactgggaggaactcaaggggccgctgcgtgaggaaaagatcagcgaggataccgcaattttgaaacttagtaaactggttcccggcaactacacattttctttaacggttgtagactcggatggtgccaccaactctacgaccgctaatcttacagtgaacaaagcggtcgattatccgggc

SEQ ID NO: 98 - DNA, 300 bp, Artificial Sequence
  Recombinant PKD2
gggaatcgtccgcccatcgctattgtcagccctcaatttcaggagatcagcttgccgacaacctccactgtaattgatggttcccagtcgaccgacgacgatcatatcgtacaataccactgggaggaactcaaggggccgctgcgtgaggaaaagatcagcgaggataccgcaattttgaaacttagtaaactggttcccggcaactacacattttctttaacggttgtagactcggatggtgccaccaactctacgaccgctaatcttacagtgaacaaagcggtcgattatccgggc

SEQ ID NO: 99 - DNA, 300 bp, Artificial Sequence
  Recombinant PKD2
gggaatcgtccgcccatcgctattgtcagccctcaatttcaggagatcagcttgccgacaacctccactgtaattgatggttcccagtcgaccgacgacgataaacatgtacaataccactgggaggaactcaaggggccgctgcgtgaggaaaagatcagcgaggataccgcaattttgaaacttagtaaactggttcccggcaactacacattttctttaacggttgtagactcggatggtgccaccaactctacgaccgctaatcttacagtgaacaaagcggtcgattatccgggc

SEQ ID NO: 100 - DNA, 300 bp, Artificial Sequence
  Recombinant PKD2
gggaatcgtccgcccatcgctattgtcagccctcaatttcaggagatcagcttgccgacaacctccactgtaattgatggttcccagtcgaccgacgacgataaaatccatcaataccactgggaggaactcaaggggccgctgcgtgaggaaaagatcagcgaggataccgcaattttgaaacttagtaaactggttcccggcaactacacattttctttaacggttgtagactcggatggtgccaccaactctacgaccgctaatcttacagtgaacaaagcggtcgattatccgggc

SEQ ID NO: 101 - DNA, 300 bp, Artificial Sequence
  Recombinant PKD2
gggaatcgtccgcccatcgctattgtcagccctcaatttcaggagatcagcttgccgacaacctccactgtaattgatggttcccagtcgaccgacgacgataaaatcgtacaacatcactgggaggaactcaaggggccgctgcgtgaggaaaagatcagcgaggataccgcaattttgaaacttagtaaactggttcccggcaactacacattttctttaacggttgtagactcggatggtgccaccaactctacgaccgctaatcttacagtgaacaaagcggtcgattatccgggc

SEQ ID NO: 102 - DNA, 300 bp, Artificial Sequence
  Recombinant PKD2
gggaatcgtccgcccatcgctattgtcagccctcaatttcaggagatcagcttgccgacaacctccactgtaattgatggttcccagtcgaccgacgacgataaaatcgtacaataccactgggaggaactcaaggggccgctgcgtgaggaaaagatcagcgaggataccgcacatttgaaacttagtaaactggttcccggcaactacacattttctttaacggttgtagactcggatggtgccaccaactctacgaccgctaatcttacagtgaacaaagcggtcgattatccgggc

SEQ ID NO: 103 - DNA, 300 bp, Artificial Sequence
  Recombinant PKD2
gggaatcgtccgcccatcgctattgtcagccctcaatttcaggagatcagcttgccgacaacctccactgtaattgatggttcccagtcgaccgacgacgataaaatccaccaacatcactgggaggaactcaaggggccgctgcgtgaggaaaagatcagcgaggataccgcaattttgaaacttagtaaactggttcccggcaactacacattttctttaacggttgtagactcggatggtgccaccaactctacgaccgctaatcttacagtgaacaaagcggtcgattatccgggc

SEQ ID NO: 104 - DNA, 300 bp, Artificial Sequence
  Recombinant PKD2
gggaatcgtccgcccatcgctattgtcagccctcaatttcaggagatcagcttgccgacaacctccactgtaattgatggtcatcactcgaccgacgacgataaaatcgtacaataccactgggaggaactcaaggggccgctgcgtgaggaaaagatcagcgaggataccgcaattttgaaacttagtaaactggttcccggcaactacacattttctttaacggttgtagactcggatggtgccaccaactctacgaccgctaatcttacagtgaacaaagcggtcgattatccgggc

SEQ ID NO: 105 - DNA, 400 bp, Artificial Sequence
  Recombinant PKD2
aattcccctctagaaataattttgtttaactttaagaaggaggagtacatatggggaatcgtccgcccatcgctattgtcagccctcaatttcaggagatcagcttgccgacaacctccactgtaattgatggttcccagtcgaccgacgacgataaaatcgtacaataccactgggaggaactcaaggggccgctgcgtgaggaaaagatcagcgaggataccgcaattttgaaacttagtaaactggttcccggcaactacacattttctttaacggttgtagactcggatggtgccaccaactctacgaccgctaatcttacagtgaacaaagcggtcgattatccgggctactgataatgatcttcaggatccgaattcgagctccgtcgacaagc

SEQ ID NO: 106 - DNA, 400 bp, Artificial Sequence
  Recombinant PKD2
aattcccctctagaaataattttgtttaactttaagaaggaggagtacatatggggaatcgtccgcccatcgctattgtcagccctcaatttcaggagatcagcttgccgacaacctccactgtaattgatggtcatcagtcgaccgacgacgataaaatcgtacaataccactgggaggaactcaaggggccgctgcgtgaggaaaagatcagcgaggataccgcaattttgaaacttagtaaactggttcccggcaactacacattttctttaacggttgtagactcggatggtgccaccaactctacgaccgctaatcttacagtgaacaaagcggtcgattatccgggctactgataatgatcttcaggatccgaattcgagctccgtcgacaagc

SEQ ID NO: 107 - DNA, 400 bp, Artificial Sequence
  Recombinant PKD2
aattcccctctagaaataattttgtttaactttaagaaggaggagtacatatggggaatcgtccgcccatcgctattgtcagccctcaatttcaggagatcagcttgccgacaacctccactgtaattgatggttcccattcgaccgacgacgataaaatcgtacaataccactgggaggaactcaaggggccgctgcgtgaggaaaagatcagcgaggataccgcaattttgaaacttagtaaactggttcccggcaactacacattttctttaacggttgtagactcggatggtgccaccaactctacgaccgctaatcttacagtgaacaaagcggtcgattatccgggctactgataatgatcttcaggatccgaattcgagctccgtcgacaagc

SEQ ID NO: 108 - DNA, 400 bp, Artificial Sequence
  Recombinant PKD2
aattcccctctagaaataattttgtttaactttaagaaggaggagtacatatggggaatcgtccgcccatcgctattgtcagccctcaatttcaggagatcagcttgccgacaacctccactgtaattgatggttcccagtcgcatgacgacgataaaatcgtacaataccactgggaggaactcaaggggccgctgcgtgaggaaaagatcagcgaggataccgcaattttgaaacttagtaaactggttcccggcaactacacattttctttaacggttgtagactcggatggtgccaccaactctacgaccgctaatcttacagtgaacaaagcggtcgattatccgggctactgataatgatcttcaggatccgaattcgagctccgtcgacaagc

SEQ ID NO: 109 - DNA, 400 bp, Artificial Sequence
  Recombinant PKD2
aattcccctctagaaataattttgtttaactttaagaaggaggagtacatatggggaatcgtccgcccatcgctattgtcagccctcaatttcaggagatcagcttgccgacaacctccactgtaattgatggttcccagtcgaccgacgaccataaaatcgtacaataccactgggaggaactcaaggggccgctgcgtgaggaaaagatcagcgaggataccgcaattttgaaacttagtaaactggttcccggcaactacacattttctttaacggttgtagactcggatggtgccaccaactctacgaccgctaatcttacagtgaacaaagcggtcgattatccgggctactgataatgatcttcaggatccgaattcgagctccgtcgacaagc

SEQ ID NO: 110 - DNA, 400 bp, Artificial Sequence
  Recombinant PKD2
aattcccctctagaaataattttgtttaactttaagaaggaggagtacatatggggaatcgtccgcccatcgctattgtcagccctcaatttcaggagatcagcttgccgacaacctccactgtaattgatggttcccagtcgaccgacgacgatcatatcgtacaataccactgggaggaactcaaggggccgctgcgtgaggaaaagatcagcgaggataccgcaattttgaaacttagtaaactggttcccggcaactacacattttctttaacggttgtagactcggatggtgccaccaactctacgaccgctaatcttacagtgaacaaagcggtcgattatccgggctactgataatgatcttcaggatccgaattcgagctccgtcgacaagc

SEQ ID NO: 111 - DNA, 400 bp, Artificial Sequence
  Recombinant PKD2
aattcccctctagaaataattttgtttaactttaagaaggaggagtacatatggggaatcgtccgcccatcgctattgtcagccctcaatttcaggagatcagcttgccgacaacctccactgtaattgatggttcccagtcgaccgacgacgataaacatgtacaataccactgggaggaactcaaggggccgctgcgtgaggaaaagatcagcgaggataccgcaattttgaaacttagtaaactggttcccggcaactacacattttctttaacggttgtagactcggatggtgccaccaactctacgaccgctaatcttacagtgaacaaagcggtcgattatccgggctactgataatgatcttcaggatccgaattcgagctccgtcgacaagc

SEQ ID NO: 112 - DNA, 400 bp, Artificial Sequence
  Recombinant PKD2
aattcccctctagaaataattttgtttaactttaagaaggaggagtacatatggggaatcgtccgcccatcgctattgtcagccctcaatttcaggagatcagcttgccgacaacctccactgtaattgatggttcccagtcgaccgacgacgataaaatccatcaataccactgggaggaactcaaggggccgctgcgtgaggaaaagatcagcgaggataccgcaattttgaaacttagtaaactggttcccggcaactacacattttctttaacggttgtagactcggatggtgccaccaactctacgaccgctaatcttacagtgaacaaagcggtcgattatccgggctactgataatgatcttcaggatccgaattcgagctccgtcgacaagc

SEQ ID NO: 113 - DNA, 400 bp, Artificial Sequence
  Recombinant PKD2
aattcccctctagaaataattttgtttaactttaagaaggaggagtacatatggggaatcgtccgcccatcgctattgtcagccctcaatttcaggagatcagcttgccgacaacctccactgtaattgatggttcccagtcgaccgacgacgataaaatcgtacaacatcactgggaggaactcaaggggccgctgcgtgaggaaaagatcagcgaggataccgcaattttgaaacttagtaaactggttcccggcaactacacattttctttaacggttgtagactcggatggtgccaccaactctacgaccgctaatcttacagtgaacaaagcggtcgattatccgggctactgataatgatcttcaggatccgaattcgagctccgtcgacaagc

SEQ ID NO: 114 - DNA, 400 bp, Artificial Sequence
  Recombinant PKD2
aattcccctctagaaataattttgtttaactttaagaaggaggagtacatatggggaatcgtccgcccatcgctattgtcagccctcaatttcaggagatcagcttgccgacaacctccactgtaattgatggttcccagtcgaccgacgacgataaaatcgtacaataccactgggaggaactcaaggggccgctgcgtgaggaaaagatcagcgaggataccgcacatttgaaacttagtaaactggttcccggcaactacacattttctttaacggttgtagactcggatggtgccaccaactctacgaccgctaatcttacagtgaacaaagcggtcgattatccgggctactgataatgatcttcaggatccgaattcgagctccgtcgacaagc

SEQ ID NO: 115 - DNA, 400 bp, Artificial Sequence
  Recombinant PKD2
aattcccctctagaaataattttgtttaactttaagaaggaggagtacatatggggaatcgtccgcccatcgctattgtcagccctcaatttcaggagatcagcttgccgacaacctccactgtaattgatggttcccagtcgaccgacgacgataaaatccaccaacatcactgggaggaactcaaggggccgctgcgtgaggaaaagatcagcgaggataccgcaattttgaaacttagtaaactggttcccggcaactacacattttctttaacggttgtagactcggatggtgccaccaactctacgaccgctaatcttacagtgaacaaagcggtcgattatccgggctactgataatgatcttcaggatccgaattcgagctccgtcgacaagc

SEQ ID NO: 116 - DNA, 400 bp, Artificial Sequence
  Recombinant PKD2
aattcccctctagaaataattttgtttaactttaagaaggaggagtacatatggggaatcgtccgcccatcgctattgtcagccctcaatttcaggagatcagcttgccgacaacctccactgtaattgatggtcatcactcgaccgacgacgataaaatcgtacaataccactgggaggaactcaaggggccgctgcgtgaggaaaagatcagcgaggataccgcaattttgaaacttagtaaactggttcccggcaactacacattttctttaacggttgtagactcggatggtgccaccaactctacgaccgctaatcttacagtgaacaaagcggtcgattatccgggctactgataatgatcttcaggatccgaattcgagctccgtcgacaagc

SEQ ID NO: 117 - protein, 58 aa, Artificial Sequence [sequence omitted]

SEQ ID NO: 118 - protein, 59 aa, Artificial Sequence
  Capture domain
VDNKFNKEQQNAFYEILSLPNLNEEQRAAFIQSLKDDPSQSANLLAEAKKLNDAQAPKG

SEQ ID NO: 119 - protein, 59 aa, Artificial Sequence
  Capture domain
VDNKFNKEHQNAFYEILHLPNLNEEQRNAFIQSLKHDPSQSANLLAEAKKLNDAQAPKG

SEQ ID NO: 120 - protein, 254 aa, Artificial Sequence
  Capture domain
AQHDEAQQNAFYQVLNMPNLNADQRNGFIQSLKDDPSQSANVLGEAQKLNDSQAPKADAQQNKFNKDQQSAFYEILNMPNLNEEQRNGFIQSLKDDPSQSTNVLGEAKKLNESQAPKADNNFNKEQQNAFYEILNMPNLNEEQRNGFIQSLKDDPSQSANLLAEAKKLNESQAPKADNKFNKEQQNAFYEILHLPNLNEEQRNGFIQSLKDDPSQSANLLAEAKKLNDAQAPKADNKFNKEQQNAFYEILHLPN

SEQ ID NO: 121 - protein, 56 aa, Artificial Sequence
  Capture domain
TYKLILNGKTLKGETTTEAVDAATAEKVFKQYANDNGVDGEWTYDDATKTFTVTEG

SEQ ID NO: 122 - protein, 189 aa, Artificial Sequence
  Capture domain
KTDTYKLILNGKTLKGETTTEAVDAATAEKVFKQYANDNGVDGEWTYDDATKTFTVTEKPEVIDASELTPAVTTYKLVINGKTLKGETTTKAVDAETAEKAFKQYANDNGVDGVWTYDDATKTFTVTEMVTEVPGDAPTEPEKPEASIPLVPLTPATPIAKDDAKKDDTKKEDAKKPEAKKDDAKKAET

SEQ ID NO: 123 - protein, 76 aa, Artificial Sequence
  Capture domain
KEETPETPETDSEEEVTIKANLIFANGSTQTAEFKGTFEKATSEAYAYADTLKKDNGEYTVDVADKGYTLNLKFAG

SEQ ID NO: 124 - protein, 7 aa, Artificial Sequence
  Capture domain
  SITE (5)..(7): Xaa can be any naturally occurring amino acid
GYVSXXX

SEQ ID NO: 125 - protein, 226 aa, Artificial Sequence
  Capture domain
SDVQLQESGPDLVKPSQSLSLTCTVTGYSITSGYTWHWIRQFPGNKQEWGYIHFSGYTNYNPSLKSRVSITRDTSKNQFFLHLNSVTTEDTATYYCARGDYGYEWFTYWGQGTLVTVSADIQMTQSSSSFSVSLGDRVTITCKASEDIHNRLAWYKQKPGNAPRLLISGATSLETGVPSRFSGSGSGKDYTLSITSLQNEDVATYYCQQYWIGPFTFGSGTNLEIK

SEQ ID NO: 126 - protein, 11 aa, Artificial Sequence
  Capture domain
GYVSRHPGGGC

SEQ ID NO: 127 - protein, 12 aa, Artificial Sequence
  Capture domain
GYVSRHPGGGGS

SEQ ID NO: 128 - protein, 11 aa, Artificial Sequence
  Capture domain
FHENWPSGGGC

SEQ ID NO: 129 - protein, 12 aa, Artificial Sequence
  Capture domain
FHENWPSGGGGS

SEQ ID NO: 130 - protein, 7 aa, Artificial Sequence
  Capture domain
GVVTINP

SEQ ID NO: 131 - protein, 7 aa, Artificial Sequence
  Capture domain
GLVTPSG

SEQ ID NO: 132 - protein, 7 aa, Artificial Sequence
  Capture domain
GYVSHRS

SEQ ID NO: 133 - protein, 7 aa, Artificial Sequence
  Capture domain
KVWILTP

SEQ ID NO: 134 - protein, 7 aa, Artificial Sequence
  Capture domain
KLWVIPQ

SEQ ID NO: 135 - protein, 479 aa, Artificial Sequence
  Capture domain
GVSAGESVQITLPKNEVQLNAYVLQEPPKGETYTYDWQLITHPRDYSGEMEGKHSQILKLSKLTPGLYEFKVIVEGQNAHGEGYVNVTVKPEPRKNRPPIAIVSPQFQEISLPTTSTVIDGSQSTDDDKIVQYHWEELKGPLREEKISEDTAILKLSKLVPGNYTFSLTVVDSDGATNSTTANLTVNKAVDYPPVANAGPNQVITLPQNSITLFGNQSTDDHGITSYEWSLSPSSKGKVVEMQGVRTPTLQLSAMQEGDYTYQLTVTDTIGQQATAQVTVIVQPENNKPPQADAGPDKELTLPVDSTTLDGSKSSDDQKIISYLWEKTQGPDGVQLENANSSVATVTGLQVGTYVFTLTVKDERNLQSQSSVNVIVKEEINKPPIAKITGNVVITLPTSTAELDGSKSSDDKGIVSYLWTRDEGSPAAGEVLNHSDHHPILFLSNLVEGTYTFHLKVTDAKGESDTDRTTVEVKPDPRG

SEQ ID NO: 136 - protein, 90 aa, Artificial Sequence; identical to SEQ ID NO: 28
  Capture domain

SEQ ID NO: 137 - protein, 90 aa, Artificial Sequence; identical to SEQ ID NO: 29
  Capture domain

SEQ ID NO: 138 - protein, 190 aa, Artificial Sequence
  Capture domain
MGVSAGESVQITLPKNEVQLNAYVLQEPPKGETYTYDWQLITHPRDYSGEMEGKHSQILKLSKLTPGLYEFKVIVEGQNAHGEGYVNVTVKPEPRKNRPPIAIVSPQFQEISLPTTSTVIDGSQSTDDDKIVQYHWEELKGPLREEKISEDTAILKLSKLVPGNYTFSLTVVDSDGATNSTTANLTVNKA

SEQ ID NO: 139 - protein, 91 aa, Artificial Sequence; identical to SEQ ID NO: 30
  Capture domain

SEQ ID NO: 140 - protein, 89 aa, Artificial Sequence; identical to SEQ ID NO: 31
  Capture domain

SEQ ID NO: 141 - protein, 93 aa, Artificial Sequence
  Capture domain
IAKITGNVVITLPTSTAELDGSKSSDDKGIVSYLWTRDEGSPAAGEVLNHSDHHPILFLSNLVEGTYTFHLKVTDAKGESDTDRTTVEVKPDP

SEQ ID NO: 142 - protein, 46 aa, Artificial Sequence
  Capture domain
LAEAKVLANRELDKYGVSDYYKNLINNAKTVEGVKALIDEILAALP

SEQ ID NO: 143 - protein, 800 aa, Artificial Sequence
  elastin-like polypeptide
  SITE (61)..(800): May be present or absent in groups of the repeat unit Gly Val Gly Val Pro
GVGVPGVGVPGVGVPGVGVPGVGVPGVGVPGVGVPGVGVPGVGVPGVGVPGVGVPGVGVPGVGVPGVGVPGVGVPGVGVPGVGVPGVGVPGVGVPGVGVPGVGVPGVGVPGVGVPGVGVPGVGVPGVGVPGVGVPGVGVPGVGVPGVGVPGVGVPGVGVPGVGVPGVGVPGVGVPGVGVPGVGVPGVGVPGVGVPGVGVPGVGVPGVGVPGVGVPGVGVPGVGVPGVGVPGVGVPGVGVPGVGVPGVGVPGVGVPGVGVPGVGVPGVGVPGVGVPGVGVPGVGVPGVGVPGVGVPGVGVPGVGVPGVGVPGVGVPGVGVPGVGVPGVGVPGVGVPGVGVPGVGVPGVGVPGVGVPGVGVPGVGVPGVGVPGVGVPGVGVPGVGVPGVGVPGVGVPGVGVPGVGVPGVGVPGVGVPGVGVPGVGVPGVGVPGVGVPGVGVPGVGVPGVGVPGVGVPGVGVPGVGVPGVGVPGVGVPGVGVPGVGVPGVGVPGVGVPGVGVPGVGVPGVGVPGVGVPGVGVPGVGVPGVGVPGVGVPGVGVPGVGVPGVGVPGVGVPGVGVPGVGVPGVGVPGVGVPGVGVPGVGVPGVGVPGVGVPGVGVPGVGVPGVGVPGVGVPGVGVPGVGVPGVGVPGVGVPGVGVPGVGVPGVGVPGVGVPGVGVPGVGVPGVGVPGVGVPGVGVPGVGVPGVGVPGVGVPGVGVPGVGVPGVGVPGVGVPGVGVPGVGVPGVGVPGVGVPGVGVPGVGVPGVGVPGVGVPGVGVPGVGVPGVGVPGVGVPGVGVPGVGVPGVGVPGVGVPGVGVP

SEQ ID NO: 144 - protein, 800 aa, Artificial Sequence
  elastin-like polypeptide
  SITE (51)..(800): May be present or absent in groups of the repeat unit Gly Val Gly Val Pro Gly Val Gly Val Pro Gly Ala Gly Val Pro Gly Val Gly Val Pro Gly Val Gly Val Pro
GVGVPGVGVPGAGVPGVGVPGVGVPGVGVPGVGVPGAGVPGVGVPGVGVPGVGVPGVGVPGAGVPGVGVPGVGVPGVGVPGVGVPGAGVPGVGVPGVGVPGVGVPGVGVPGAGVPGVGVPGVGVPGVGVPGVGVPGAGVPGVGVPGVGVPGVGVPGVGVPGAGVPGVGVPGVGVPGVGVPGVGVPGAGVPGVGVPGVGVPGVGVPGVGVPGAGVPGVGVPGVGVPGVGVPGVGVPGAGVPGVGVPGVGVPGVGVPGVGVPGAGVPGVGVPGVGVPGVGVPGVGVPGAGVPGVGVPGVGVPGVGVPGVGVPGAGVPGVGVPGVGVPGVGVPGVGVPGAGVPGVGVPGVGVPGVGVPGVGVPGAGVPGVGVPGVGVPGVGVPGVGVPGAGVPGVGVPGVGVPGVGVPGVGVPGAGVPGVGVPGVGVPGVGVPGVGVPGAGVPGVGVPGVGVPGVGVPGVGVPGAGVPGVGVPGVGVPGVGVPGVGVPGAGVPGVGVPGVGVPGVGVPGVGVPGAGVPGVGVPGVGVPGVGVPGVGVPGAGVPGVGVPGVGVPGVGVPGVGVPGAGVPGVGVPGVGVPGVGVPGVGVPGAGVPGVGVPGVGVPGVGVPGVGVPGAGVPGVGVPGVGVPGVGVPGVGVPGAGVPGVGVPGVGVPGVGVPGVGVPGAGVPGVGVPGVGVPGVGVPGVGVPGAGVPGVGVPGVGVPGVGVPGVGVPGAGVPGVGVPGVGVPGVGVPGVGVPGAGVPGVGVPGVGVPGVGVPGVGVPGAGVPGVGVPGVGVPGVGVPGVGVPGAGVPGVGVPGVGVP

SEQ ID NO: 145 - protein, 800 aa, Artificial Sequence
  elastin-like polypeptide
  SITE (51)..(800): May be present or absent in groups of the repeat unit Gly Val Gly Val Pro Gly Ala Gly Val Pro
GVGVPGAGVPGVGVPGAGVPGVGVPGAGVPGVGVPGAGVPGVGVPGAGVPGVGVPGAGVPGVGVPGAGVPGVGVPGAGVPGVGVPGAGVPGVGVPGAGVPGVGVPGAGVPGVGVPGAGVPGVGVPGAGVPGVGVPGAGVPGVGVPGAGVPGVGVPGAGVPGVGVPGAGVPGVGVPGAGVPGVGVPGAGVPGVGVPGAGVPGVGVPGAGVPGVGVPGAGVPGVGVPGAGVPGVGVPGAGVPGVGVPGAGVPGVGVPGAGVPGVGVPGAGVPGVGVPGAGVPGVGVPGAGVPGVGVPGAGVPGVGVPGAGVPGVGVPGAGVPGVGVPGAGVPGVGVPGAGVPGVGVPGAGVPGVGVPGAGVPGVGVPGAGVPGVGVPGAGVPGVGVPGAGVPGVGVPGAGVPGVGVPGAGVPGVGVPGAGVPGVGVPGAGVPGVGVPGAGVPGVGVPGAGVPGVGVPGAGVPGVGVPGAGVPGVGVPGAGVPGVGVPGAGVPGVGVPGAGVPGVGVPGAGVPGVGVPGAGVPGVGVPGAGVPGVGVPGAGVPGVGVPGAGVPGVGVPGAGVPGVGVPGAGVPGVGVPGAGVPGVGVPGAGVPGVGVPGAGVPGVGVPGAGVPGVGVPGAGVPGVGVPGAGVPGVGVPGAGVPGVGVPGAGVPGVGVPGAGVPGVGVPGAGVPGVGVPGAGVPGVGVPGAGVPGVGVPGAGVPGVGVPGAGVPGVGVPGAGVPGVGVPGAGVPGVGVPGAGVPGVGVPGAGVPGVGVPGAGVPGVGVPGAGVPGVGVPGAGVPGVGVPGAGVPGVGVPGAGVP

SEQ ID NO: 146 - protein, 800 aa, Artificial Sequence
  elastin-like polypeptide
  SITE (51)..(800): May be present or absent in groups of the repeat unit Gly Val Gly Val Pro Gly Val Gly Val Pro Gly Leu Gly Val Pro Gly Val Gly Val Pro Gly Val Gly Val Pro
GVGVPGVGVPGLGVPGVGVPGVGVPGVGVPGVGVPGLGVPGVGVPGVGVPGVGVPGVGVPGLGVPGVGVPGVGVPGVGVPGVGVPGLGVPGVGVPGVGVPGVGVPGVGVPGLGVPGVGVPGVGVPGVGVPGVGVPGLGVPGVGVPGVGVPGVGVPGVGVPGLGVPGVGVPGVGVPGVGVPGVGVPGLGVPGVGVPGVGVPGVGVPGVGVPGLGVPGVGVPGVGVPGVGVPGVGVPGLGVPGVGVPGVGVPGVGVPGVGVPGLGVPGVGVPGVGVPGVGVPGVGVPGLGVPGVGVPGVGVPGVGVPGVGVPGLGVPGVGVPGVGVPGVGVPGVGVPGLGVPGVGVPGVGVPGVGVPGVGVPGLGVPGVGVPGVGVPGVGVPGVGVPGLGVPGVGVPGVGVPGVGVPGVGVPGLGVPGVGVPGVGVPGVGVPGVGVPGLGVPGVGVPGVGVPGVGVPGVGVPGLGVPGVGVPGVGVPGVGVPGVGVPGLGVPGVGVPGVGVPGVGVPGVGVPGLGVPGVGVPGVGVPGVGVPGVGVPGLGVPGVGVPGVGVPGVGVPGVGVPGLGVPGVGVPGVGVPGVGVPGVGVPGLGVPGVGVPGVGVPGVGVPGVGVPGLGVPGVGVPGVGVPGVGVPGVGVPGLGVPGVGVPGVGVPGVGVPGVGVPGLGVPGVGVPGVGVPGVGVPGVGVPGLGVPGVGVPGVGVPGVGVPGVGVPGLGVPGVGVPGVGVPGVGVPGVGVPGLGVPGVGVPGVGVPGVGVPGVGVPGLGVPGVGVPGVGVPGVGVPGVGVPGLGVPGVGVPGVGVP

SEQ ID NO: 147 - protein, 800 aa, Artificial Sequence
  elastin-like polypeptide
  SITE (2)..(2): Xaa can be Gly, Ala, Val, Ile, Leu, Phe, Tyr, Trp, Lys, Arg, Asp, Glu or Ser
  SITE (7)..(7): Xaa can be Gly, Ala, Val, Ile, Leu, Phe, Tyr, Trp, Lys, Arg, Asp, Glu or Ser
  SITE (12)..(12): Xaa can be Gly, Ala, Val, Ile, Leu, Phe, Tyr, Trp, Lys, Arg, Asp, Glu or Ser
  SITE (17)..(17): Xaa can be Gly, Ala, Val, Ile, Leu, Phe, Tyr, Trp, Lys, Arg, Asp, Glu or Ser
  SITE (22)..(22): Xaa can be Gly, Ala, Val, Ile, Leu, Phe, Tyr, Trp, Lys, Arg, Asp, Glu or Ser
  SITE (27)..(27): Xaa can be Gly, Ala, Val, Ile, Leu, Phe, Tyr, Trp, Lys, Arg, Asp, Glu or Ser
  SITE (32)..(32): Xaa can be Gly, Ala, Val, Ile, Leu, Phe, Tyr, Trp, Lys, Arg, Asp, Glu or Ser
  SITE (37)..(37): Xaa can be Gly, Ala, Val, Ile, Leu, Phe, Tyr, Trp, Lys, Arg, Asp, Glu or Ser
  SITE (42)..(42): Xaa can be Gly, Ala, Val, Ile, Leu, Phe, Tyr, Trp, Lys, Arg, Asp, Glu or Ser
  SITE (47)..(47): Xaa can be Gly, Ala, Val, Ile, Leu, Phe, Tyr, Trp, Lys, Arg, Asp, Glu or Ser
  SITE (51)..(800): May be present or absent in groups of the repeat unit Gly Xaa Gly Val Pro
  SITE (52)..(52): Xaa can be Gly, Ala, Val, Ile, Leu, Phe, Tyr, Trp, Lys, Arg, Asp, Glu or Ser
  SITE (57)..(57): Xaa can be Gly, Ala, Val, Ile, Leu, Phe, Tyr, Trp, Lys, Arg, Asp, Glu or Ser
  SITE (62)..(62): Xaa can be Gly, Ala, Val, Ile, Leu, Phe, Tyr, Trp, Lys, Arg, Asp, Glu or Ser
  SITE (67)..(67): Xaa can be Gly, Ala, Val, Ile, Leu, Phe, Tyr, Trp, Lys, Arg, Asp, Glu or Ser
  SITE (72)..(72): Xaa can be Gly, Ala, Val, Ile, Leu, Phe, Tyr, Trp, Lys, Arg, Asp, Glu or Ser
  SITE (77)..(77): Xaa can be Gly, Ala, Val, Ile, Leu, Phe, Tyr, Trp, Lys, Arg, Asp, Glu or Ser
  SITE (82)..(82): Xaa can be Gly, Ala, Val, Ile, Leu, Phe, Tyr, Trp, Lys, Arg, Asp, Glu or Ser
  SITE (87)..(87): Xaa can be Gly, Ala, Val, Ile, Leu, Phe, Tyr, Trp, Lys, Arg, Asp, Glu or Ser
  SITE (92)..(92): Xaa can be Gly, Ala, Val, Ile, Leu, Phe, Tyr, Trp, Lys, Arg, Asp, Glu or Ser
  SITE (97)..(97): Xaa can be Gly, Ala, Val, Ile, Leu, Phe, Tyr, Trp, Lys, Arg, Asp, Glu or Ser
  SITE (102)..(102): Xaa can be Gly, Ala, Val, Ile, Leu, Phe, Tyr, Trp, Lys, Arg, Asp, Glu or Ser
  SITE (107)..(107): Xaa can be Gly, Ala, Val, Ile, Leu, Phe, Tyr, Trp, Lys, Arg, Asp, Glu or Ser
  SITE (112)..(112): Xaa can be Gly, Ala, Val, Ile, Leu, Phe, Tyr, Trp, Lys, Arg, Asp, Glu or Ser
  SITE (117)..(117): Xaa can be Gly, Ala, Val, Ile, Leu, Phe, Tyr, Trp, Lys, Arg, Asp, Glu or Ser
  SITE (122)..(122): Xaa can be Gly, Ala, Val, Ile, Leu, Phe, Tyr, Trp, Lys, Arg, Asp, Glu or Ser
  SITE (127)..(127): Xaa can be Gly, Ala, Val, Ile, Leu, Phe, Tyr, Trp, Lys, Arg, Asp, Glu or Ser
  SITE (132)..(132): Xaa can be Gly, Ala, Val, Ile, Leu, Phe, Tyr, Trp, Lys, Arg, Asp, Glu or Ser
  SITE (137)..(137): Xaa can be Gly, Ala, Val, Ile, Leu, Phe, Tyr, Trp, Lys, Arg, Asp, Glu or Ser
  SITE (142)..(142): Xaa can be Gly, Ala, Val, Ile, Leu, Phe, Tyr, Trp, Lys, Arg, Asp, Glu or Ser
  SITE (147)..(147): Xaa can be Gly, Ala, Val, Ile, Leu, Phe, Tyr, Trp, Lys, Arg, Asp, Glu or Ser
  SITE (152)..(152): Xaa can be Gly, Ala, Val, Ile, Leu, Phe, Tyr, Trp, Lys, Arg, Asp, Glu or Ser
  SITE (157)..(157): Xaa can be Gly, Ala, Val, Ile, Leu, Phe, Tyr, Trp, Lys, Arg, Asp, Glu or Ser
  SITE (162)..(162): Xaa can be Gly, Ala, Val, Ile, Leu, Phe, Tyr, Trp, Lys, Arg, Asp, Glu or Ser
  SITE (167)..(167): Xaa can be Gly, Ala, Val, Ile, Leu, Phe, Tyr, Trp, Lys, Arg, Asp, Glu or Ser
  SITE (172)..(172): Xaa can be Gly, Ala, Val, Ile, Leu, Phe, Tyr, Trp, Lys, Arg, Asp, Glu or Ser
  SITE (177)..(177): Xaa can be Gly, Ala, Val, Ile, Leu, Phe, Tyr, Trp, Lys, Arg, Asp, Glu or Ser
  SITE (182)..(182): Xaa can be Gly, Ala, Val, Ile, Leu, Phe, Tyr, Trp, Lys, Arg, Asp, Glu or Ser
  SITE (187)..(187): Xaa can be Gly, Ala, Val, Ile, Leu, Phe, Tyr, Trp, Lys, Arg, Asp, Glu or Ser
  SITE (192)..(192): Xaa can be Gly, Ala, Val, Ile, Leu, Phe, Tyr, Trp, Lys, Arg, Asp, Glu or Ser
  SITE (197)..(197): Xaa can be Gly, Ala, Val, Ile, Leu, Phe, Tyr, Trp, Lys, Arg, Asp, Glu or Ser
  SITE (202)..(202): Xaa can be Gly, Ala, Val, Ile, Leu, Phe, Tyr, Trp, Lys, Arg, Asp, Glu or Ser
  SITE (207)..(207): Xaa can be Gly, Ala, Val, Ile, Leu, Phe, Tyr, Trp, Lys, Arg, Asp, Glu or Ser
  SITE (212)..(212): Xaa can be Gly, Ala, Val, Ile, Leu, Phe, Tyr, Trp, Lys, Arg, Asp, Glu or Ser
  SITE (217)..(217): Xaa can be Gly, Ala, Val, Ile, Leu, Phe, Tyr, Trp, Lys, Arg, Asp, Glu or Ser
  SITE (222)..(222): Xaa can be Gly, Ala, Val, Ile, Leu, Phe, Tyr, Trp, Lys, Arg, Asp, Glu or Ser
  SITE (227)..(227): Xaa can be Gly, Ala, Val, Ile, Leu, Phe, Tyr, Trp, Lys, Arg, Asp, Glu or Ser
  SITE (232)..(232): Xaa can be Gly, Ala, Val, Ile, Leu, Phe, Tyr, Trp, Lys, Arg, Asp, Glu or Ser
  SITE (237)..(237): Xaa can be Gly, Ala, Val, Ile, Leu, Phe, Tyr, Trp, Lys, Arg, Asp, Glu or Ser
  SITE (242)..(242): Xaa can be Gly, Ala, Val, Ile, Leu, Phe, Tyr, Trp, Lys, Arg, Asp, Glu or Ser
  SITE (247)..(247): Xaa can be Gly, Ala, Val, Ile, Leu, Phe, Tyr, Trp, Lys, Arg, Asp, Glu or Ser
  SITE (252)..(252): Xaa can be Gly, Ala, Val, Ile, Leu, Phe, Tyr, Trp, Lys, Arg, Asp, Glu or Ser
  SITE (257)..(257): Xaa can be Gly, Ala, Val, Ile, Leu, Phe, Tyr, Trp, Lys, Arg, Asp, Glu or Ser
  SITE (262)..(262): Xaa can be Gly, Ala, Val, Ile, Leu, Phe, Tyr, Trp, Lys, Arg, Asp, Glu or Ser
  SITE (267)..(267): Xaa can be Gly, Ala, Val, Ile, Leu, Phe, Tyr, Trp, Lys, Arg, Asp, Glu or Ser
  SITE (272)..(272): Xaa can be Gly, Ala, Val, Ile, Leu, Phe, Tyr, Trp, Lys, Arg, Asp, Glu or Ser
  SITE (277)..(277): Xaa can be Gly, Ala, Val, Ile, Leu, Phe, Tyr, Trp, Lys, Arg, Asp, Glu or Ser
  SITE (282)..(282): Xaa can be Gly, Ala, Val, Ile, Leu, Phe, Tyr, Trp, Lys, Arg, Asp, Glu or Ser
  SITE (287)..(287): Xaa can be Gly, Ala, Val, Ile, Leu, Phe, Tyr, Trp, Lys, Arg, Asp, Glu or Ser
  SITE (292)..(292): Xaa can be Gly, Ala, Val, Ile, Leu, Phe, Tyr, Trp, Lys, Arg, Asp, Glu or Ser
  SITE (297)..(297): Xaa can be Gly, Ala, Val, Ile, Leu, Phe, Tyr, Trp, Lys, Arg, Asp, Glu or Ser
  SITE (302)..(302): Xaa can be Gly, Ala, Val, Ile, Leu, Phe, Tyr, Trp, Lys, Arg, Asp, Glu or Ser
  SITE (307)..(307): Xaa can be Gly, Ala, Val, Ile, Leu, Phe, Tyr, Trp, Lys, Arg, Asp, Glu or Ser
  SITE (312)..(312): Xaa can be Gly, Ala, Val, Ile, Leu, Phe, Tyr, Trp, Lys, Arg, Asp, Glu or Ser
  SITE (317)..(317): Xaa can be Gly, Ala, Val, Ile, Leu, Phe, Tyr, Trp, Lys, Arg, Asp, Glu or Ser
  SITE (322)..(322): Xaa can be Gly, Ala, Val, Ile, Leu, Phe, Tyr, Trp, Lys, Arg, Asp, Glu or Ser
  SITE (327)..(327): Xaa can be Gly, Ala, Val, Ile, Leu, Phe, Tyr, Trp, Lys, Arg, Asp, Glu or Ser
  SITE (332)..(332): Xaa can be Gly, Ala, Val, Ile, Leu, Phe, Tyr, Trp, Lys, Arg, Asp, Glu or Ser
  SITE (337)..(337): Xaa can be Gly, Ala, Val, Ile, Leu, Phe, Tyr, Trp, Lys, Arg, Asp, Glu or Ser
  SITE (342)..(342): Xaa can be Gly, Ala, Val, Ile, Leu, Phe, Tyr, Trp, Lys, Arg, Asp, Glu or Ser
  SITE (347)..(347): Xaa can be Gly, Ala, Val, Ile, Leu, Phe, Tyr, Trp, Lys, Arg, Asp, Glu or Ser
  SITE (352)..(352): Xaa can be Gly, Ala, Val, Ile, Leu, Phe, Tyr, Trp, Lys, Arg, Asp, Glu or Ser
  SITE (357)..(357): Xaa can be Gly, Ala, Val, Ile, Leu, Phe, Tyr, Trp, Lys, Arg, Asp, Glu or Ser
  SITE (362)..(362): Xaa can be Gly, Ala, Val, Ile, Leu, Phe, Tyr, Trp, Lys, Arg, Asp, Glu or Ser
  SITE (367)..(367): Xaa can be Gly, Ala, Val, Ile, Leu, Phe, Tyr, Trp, Lys, Arg, Asp, Glu or Ser
  SITE (372)..(372): Xaa can be Gly, Ala, Val, Ile, Leu, Phe, Tyr, Trp, Lys, Arg, Asp, Glu or Ser
  SITE (377)..(377): Xaa can be Gly, Ala, Val, Ile, Leu, Phe, Tyr, Trp, Lys, Arg, Asp, Glu or Ser
  SITE (382)..(382): Xaa can be Gly, Ala, Val, Ile, Leu, Phe, Tyr, Trp, Lys, Arg, Asp, Glu or Ser
  SITE (387)..(387): Xaa can be Gly, Ala, Val, Ile, Leu, Phe, Tyr, Trp, Lys, Arg, Asp, Glu or Ser
  SITE (392)..(392): Xaa can be Gly, Ala, Val, Ile, Leu, Phe, Tyr, Trp, Lys, Arg, Asp, Glu or Ser
  SITE (397)..(397): Xaa can be Gly, Ala, Val, Ile, Leu, Phe, Tyr, Trp, Lys, Arg, Asp, Glu or Ser
  SITE (402)..(402): Xaa can be Gly, Ala, Val, Ile, Leu, Phe, Tyr, Trp, Lys, Arg, Asp, Glu or Ser
  SITE (407)..(407): Xaa can be Gly, Ala, Val, Ile, Leu, Phe, Tyr, Trp, Lys, Arg, Asp, Glu or Ser
  SITE (412)..(412): Xaa can be Gly, Ala, Val, Ile, Leu, Phe, Tyr, Trp, Lys, Arg, Asp, Glu or Ser
  SITE (417)..(417): Xaa can be Gly, Ala, Val, Ile, Leu, Phe, Tyr, Trp, Lys, Arg, Asp, Glu or Ser
  SITE (422)..(422): Xaa can be Gly, Ala, Val, Ile, Leu, Phe, Tyr, Trp, Lys, Arg, Asp, Glu or Ser
  SITE (427)..(427): Xaa can be Gly, Ala, Val, Ile, Leu, Phe, Tyr, Trp, Lys, Arg, Asp, Glu or Ser
  SITE (432)..(432): Xaa can be Gly, Ala, Val, Ile, Leu, Phe, Tyr, Trp, Lys, Arg, Asp, Glu or Ser
  SITE (437)..(437): Xaa can be Gly, Ala, Val, Ile, Leu, Phe, Tyr, Trp, Lys, Arg, Asp, Glu or Ser
  SITE (442)..(442): Xaa can be Gly, Ala, Val, Ile, Leu, Phe, Tyr, Trp, Lys, Arg, Asp, Glu or Ser
  SITE (447)..(447): Xaa can be Gly, Ala, Val, Ile, Leu, Phe, Tyr, Trp, Lys, Arg, Asp, Glu or Ser
  SITE (452)..(452): Xaa can be Gly, Ala, Val, Ile, Leu, Phe, Tyr, Trp, Lys, Arg, Asp, Glu or Ser
  SITE (457)..(457): Xaa can be Gly, Ala, Val, Ile, Leu, Phe, Tyr, Trp, Lys, Arg, Asp, Glu or Ser
  SITE (462)..(462): Xaa can be Gly, Ala, Val, Ile, Leu, Phe, Tyr, Trp, Lys, Arg, Asp, Glu or Ser
  SITE (467)..(467): Xaa can be Gly, Ala, Val, Ile, Leu, Phe, Tyr, Trp, Lys, Arg, Asp, Glu or Ser
  SITE (472)..(472): Xaa can be Gly, Ala, Val, Ile, Leu, Phe, Tyr, Trp, Lys, Arg, Asp, Glu or Ser
  SITE (477)..(477): Xaa can be Gly, Ala, Val, Ile, Leu, Phe, Tyr, Trp, Lys, Arg, Asp, Glu or Ser
  SITE (482)..(482): Xaa can be Gly, Ala, Val, Ile, Leu, Phe, Tyr, Trp, Lys, Arg, Asp, Glu or Ser
  SITE (487)..(487): Xaa can be Gly, Ala, Val, Ile, Leu, Phe, Tyr, Trp, Lys, Arg, Asp, Glu or Ser
  SITE (492)..(492): Xaa can be Gly, Ala, Val, Ile, Leu, Phe, Tyr, Trp, Lys, Arg, Asp, Glu or Ser
  SITE (497)..(497): Xaa can be Gly, Ala, Val, Ile, Leu, Phe, Tyr, Trp, Lys, Arg, Asp, Glu or Ser
  SITE (502)..(502): Xaa can be Gly, Ala, Val, Ile, Leu, Phe, Tyr, Trp, Lys, Arg, Asp, Glu or Ser
  SITE (507)..(507): Xaa can be Gly, Ala, Val, Ile, Leu, Phe, Tyr, Trp, Lys, Arg, Asp, Glu or Ser
  SITE (512)..(512): Xaa can be Gly, Ala, Val, Ile, Leu, Phe, Tyr, Trp, Lys, Arg, Asp, Glu or Ser
  SITE (517)..(517): Xaa can be Gly, Ala, Val, Ile, Leu, Phe, Tyr, Trp, Lys, Arg, Asp, Glu or Ser
  SITE (522)..(522): Xaa can be Gly, Ala, Val, Ile, Leu, Phe, Tyr, Trp, Lys, Arg, Asp, Glu or Ser
  SITE (527)..(527): Xaa can be Gly, Ala, Val, Ile, Leu, Phe, Tyr, Trp, Lys, Arg, Asp, Glu or Ser
  SITE (532)..(532): Xaa can be Gly, Ala, Val, Ile, Leu, Phe, Tyr, Trp, Lys, Arg, Asp, Glu or Ser
  SITE (537)..(537): Xaa can be Gly, Ala, Val, Ile, Leu, Phe, Tyr, Trp, Lys, Arg, Asp, Glu or Ser
  SITE (542)..(542): Xaa can be Gly, Ala, Val, Ile, Leu, Phe, Tyr, Trp, Lys, Arg, Asp, Glu or Ser
  SITE (547)..(547): Xaa can be Gly, Ala, Val, Ile, Leu, Phe, Tyr, Trp, Lys, Arg, Asp, Glu or Ser
  SITE (552)..(552): Xaa can be Gly, Ala, Val, Ile, Leu, Phe, Tyr, Trp, Lys, Arg, Asp, Glu or Ser
  SITE (557)..(557): Xaa can be Gly, Ala, Val, Ile, Leu, Phe, Tyr, Trp, Lys, Arg, Asp, Glu or Ser
  SITE (562)..(562): Xaa can be Gly, Ala, Val, Ile, Leu, Phe, Tyr, Trp, Lys, Arg, Asp, Glu or Ser
  SITE (567)..(567): Xaa can be Gly, Ala, Val, Ile, Leu, Phe, Tyr, Trp, Lys, Arg, Asp, Glu or Ser
  SITE (572)..(572): Xaa can be Gly, Ala, Val, Ile, Leu, Phe, Tyr, Trp, Lys, Arg, Asp, Glu or Ser
  SITE (577)..(577): Xaa can be Gly, Ala, Val, Ile, Leu, Phe, Tyr, Trp, Lys, Arg, Asp, Glu or Ser
  SITE (582)..(582): Xaa can be Gly, Ala, Val, Ile, Leu, Phe, Tyr, Trp, Lys, Arg, Asp, Glu or Ser
  SITE (587)..(587): Xaa can be Gly, Ala, Val, Ile, Leu, Phe, Tyr, Trp, Lys, Arg, Asp, Glu or Ser
  SITE (592)..(592): Xaa can be Gly, Ala, Val, Ile, Leu, Phe, Tyr, Trp, Lys, Arg, Asp, Glu or Ser
  SITE (597)..(597): Xaa can be Gly, Ala, Val, Ile, Leu, Phe, Tyr, Trp, Lys, Arg, Asp, Glu or Ser
  SITE (602)..(602): Xaa can be Gly, Ala, Val, Ile, Leu, Phe, Tyr, Trp, Lys, Arg, Asp, Glu or Ser
  SITE (607)..(607): Xaa can be Gly, Ala, Val, Ile, Leu, Phe, Tyr, Trp, Lys, Arg, Asp, Glu or Ser
  SITE (612)..(612): Xaa can be Gly, Ala, Val, Ile, Leu, Phe, Tyr, Trp, Lys, Arg, Asp, Glu or Ser
  SITE (617)..(617): Xaa can be Gly, Ala, Val, Ile, Leu, Phe, Tyr, Trp, Lys, Arg, Asp, Glu or Ser
  SITE (622)..(622): Xaa can be Gly, Ala, Val, Ile, Leu, Phe, Tyr, Trp, Lys, Arg, Asp, Glu or Ser
  SITE (627)..(627): Xaa can be Gly, Ala, Val, Ile, Leu, Phe, Tyr, Trp, Lys, Arg, Asp, Glu or Ser
  SITE (632)..(632): Xaa can be Gly, Ala, Val, Ile, Leu, Phe, Tyr, Trp, Lys, Arg, Asp, Glu or Ser
  SITE (637)..(637): Xaa can be Gly, Ala, Val, Ile, Leu, Phe, Tyr, Trp, Lys, Arg, Asp, Glu or Ser
  SITE (642)..(642): Xaa can be Gly, Ala, Val, Ile, Leu, Phe, Tyr, Trp, Lys, Arg, Asp, Glu or Ser
  SITE (647)..(647): Xaa can be Gly, Ala, Val, Ile, Leu, Phe, Tyr, Trp, Lys, Arg, Asp, Glu or Ser
  SITE (652)..(652): Xaa can be Gly, Ala, Val, Ile, Leu, Phe, Tyr, Trp, Lys, Arg, Asp, Glu or Ser
  SITE (657)..(657): Xaa can be Gly, Ala, Val, Ile, Leu, Phe, Tyr, Trp, Lys, Arg, Asp, Glu or Ser
  SITE (662)..(662): Xaa can be Gly, Ala, Val, Ile, Leu, Phe, Tyr, Trp, Lys, Arg, Asp, Glu or Ser
  SITE (667)..(667): Xaa can be Gly, Ala, Val, Ile, Leu, Phe, Tyr, Trp, Lys, Arg, Asp, Glu or Ser
  SITE (672)..(672): Xaa can be Gly, Ala, Val, Ile, Leu, Phe, Tyr, Trp, Lys, Arg, Asp, Glu or Ser
  SITE (677)..(677): Xaa can be Gly, Ala, Val, Ile, Leu, Phe, Tyr, Trp, Lys, Arg, Asp, Glu or Ser
  SITE (682)..(682): Xaa can be Gly, Ala, Val, Ile, Leu, Phe, Tyr, Trp, Lys, Arg, Asp, Glu or Ser
  SITE (687)..(687): Xaa can be Gly, Ala, Val, Ile, Leu, Phe, Tyr, Trp, Lys, Arg, Asp, Glu or Ser
  SITE (692)..(692): Xaa can be Gly, Ala, Val, Ile, Leu, Phe, Tyr, Trp, Lys, Arg, Asp, Glu or Ser
  SITE (697)..(697): Xaa can be Gly, Ala, Val, Ile, Leu, Phe, Tyr, Trp, Lys, Arg, Asp, Glu or Ser
  SITE (702)..(702): Xaa can be Gly, Ala, Val, Ile, Leu, Phe, Tyr, Trp, Lys, Arg, Asp, Glu or Ser
  SITE (707)..(707): Xaa can be Gly, Ala, Val, Ile, Leu, Phe, Tyr, Trp, Lys, Arg, Asp, Glu or Ser
  SITE (712)..(712): Xaa can be Gly, Ala, Val, Ile, Leu, Phe, Tyr, Trp, Lys, Arg, Asp, Glu or Ser
  SITE (717)..(717): Xaa can be Gly, Ala, Val, Ile, Leu, Phe, Tyr, Trp, Lys, Arg, Asp, Glu or Ser
  SITE (722)..(722): Xaa can be Gly, Ala, Val, Ile, Leu, Phe, Tyr, Trp, Lys, Arg, Asp, Glu or Ser
  SITE (727)..(727): Xaa can be Gly, Ala, Val, Ile, Leu, Phe, Tyr, Trp, Lys, Arg, Asp, Glu or Ser
  SITE (732)..(732): Xaa can be Gly, Ala, Val, Ile, Leu, Phe, Tyr, Trp, Lys, Arg, Asp, Glu or Ser
  SITE (737)..(737): Xaa can be Gly, Ala, Val, Ile, Leu, Phe, Tyr, Trp, Lys, Arg, Asp, Glu or Ser
  SITE (742)..(742): Xaa can be Gly, Ala, Val, Ile, Leu, Phe, Tyr, Trp, Lys, Arg, Asp, Glu or Ser
  SITE (747)..(747): Xaa can be Gly, Ala, Val, Ile, Leu, Phe, Tyr, Trp, Lys, Arg, Asp, Glu or Ser
  SITE (752)..(752): Xaa can be Gly, Ala, Val, Ile, Leu, Phe, Tyr, Trp, Lys, Arg, Asp, Glu or Ser
  SITE (757)..(757): Xaa can be Gly, Ala, Val, Ile, Leu, Phe, Tyr, Trp, Lys, Arg, Asp, Glu or Ser
  SITE (762)..(762): Xaa can be Gly, Ala, Val, Ile, Leu, Phe, Tyr, Trp, Lys, Arg, Asp, Glu or Ser
  SITE (767)..(767): Xaa can be Gly, Ala, Val, Ile, Leu, Phe, Tyr, Trp, Lys, Arg, Asp, Glu or Ser
  SITE (772)..(772): Xaa can be Gly, Ala, Val, Ile, Leu, Phe, Tyr, Trp, Lys, Arg, Asp, Glu or Ser
  SITE (777)..(777): Xaa can be Gly, Ala, Val, Ile, Leu, Phe, Tyr, Trp, Lys, Arg, Asp, Glu or Ser
  SITE (782)..(782): Xaa can be Gly, Ala, Val, Ile, Leu, Phe, Tyr, Trp, Lys, Arg, Asp, Glu or Ser
  SITE (787)..(787): Xaa can be Gly, Ala, Val, Ile, Leu, Phe, Tyr, Trp, Lys, Arg, Asp, Glu or Ser
  SITE (792)..(792): Xaa can be Gly, Ala, Val, Ile, Leu, Phe, Tyr, Trp, Lys, Arg, Asp, Glu or Ser
  SITE (797)..(797): Xaa can be Gly, Ala, Val, Ile, Leu, Phe, Tyr, Trp, Lys, Arg, Asp, Glu or Ser
GXGVPGXGVPGXGVPGXGVPGXGVPGXGVPGXGVPGXGVPGXGVPGXGVPGXGVPGXGVPGXGVPGXGVPGXGVPGXGVPGXGVPGXGVPGXGVPGXGVPGXGVPGXGVPGXGVPGXGVPGXGVPGXGVPGXGVPGXGVPGXGVPGXGVPGXGVPGXGVPGXGVPGXGVPGXGVPGXGVPGXGVPGXGVPGXGVPGXGVPGXGVPGXGVPGXGVPGXGVPGXGVPGXGVPGXGVPGXGVPGXGVPGXGVPGXGVPGXGVPGXGVPGXGVPGXGVPGXGVPGXGVPGXGVPGXGVPGXGVPGXGVPGXGVPGXGVPGXGVPGXGVPGXGVPGXGVPGXGVPGXGVPGXGVPGXGVPGXGVPGXGVPGXGVPGXGVPGXGVPGXGVPGXGVPGXGVPGXGVPGXGVPGXGVPGXGVPGXGVPGXGVPGXGVPGXGVPGXGVPGXGVPGXGVPGXGVPGXGVPGXGVPGXGVPGXGVPGXGVPGXGVPGXGVPGXGVPGXGVPGXGVPGXGVPGXGVPGXGVPGXGVPGXGVPGXGVPGXGVPGXGVPGXGVPGXGVPGXGVPGXGVPGXGVPGXGVPGXGVPGXGVPGXGVPGXGVPGXGVPGXGVPGXGVPGXGVPGXGVPGXGVPGXGVPGXGVPGXGVPGXGVPGXGVPGXGVPGXGVPGXGVPGXGVPGXGVPGXGVPGXGVPGXGVPGXGVPGXGVPGXGVPGXGVPGXGVPGXGVPGXGVPGXGVPGXGVPGXGVPGXGVPGXGVPGXGVPGXGVPGXGVPGXGVPGXGVPGXGVPGXGVPGXGVPGXGVPGXGVP

SEQ ID NO: 148 - protein, 1440 aa, Artificial Sequence
  elastin-like polypeptide
  SITE (1)..(1): Xaa can be any naturally occurring amino acid
  SITE (2)..(2): Xaa can be any naturally occurring amino acid
  SITE (4)..(4): Xaa can be any naturally occurring amino acid except Pro or Gly
  SITE (5)..(5): Xaa can be any naturally occurring amino acid except Pro or Gly
  SITE (6)..(6): Xaa can be any naturally occurring amino acid except Pro or Gly
  SITE (7)..(7): Xaa can be any naturally occurring amino acid except Pro or Gly
  SITE (9)..(9): Xaa can be any naturally occurring amino acid
  SITE (10)..(10): Xaa can be any naturally occurring amino acid
  SITE (11)..(11): Xaa can be any naturally occurring amino acid
  SITE (13)..(13): Xaa can be any naturally occurring amino acid except Pro or Gly
  SITE (14)..(14): Xaa can be any naturally occurring amino acid except Pro or Gly
  SITE (15)..(15): Xaa can be any naturally occurring amino acid except Pro or Gly
  SITE (16)..(16): Xaa can be any naturally occurring amino acid except Pro or Gly
  SITE (18)..(18): Xaa can be any naturally occurring amino acid
  SITE (19)..(19): Xaa can be any naturally occurring amino acid
  SITE (20)..(20): Xaa can be any naturally occurring amino acid
  SITE (22)..(22): Xaa can be any naturally occurring amino acid except Pro or Gly
  SITE (23)..(23): Xaa can be any naturally occurring amino acid except Pro or Gly
  SITE (24)..(24): Xaa can be any naturally occurring amino acid except Pro or Gly
  SITE (25)..(25): Xaa can be any naturally occurring amino acid except Pro or Gly
  SITE (27)..(27): Xaa can be any naturally occurring amino acid
  SITE (28)..(28): Xaa can be any naturally occurring amino acid
  SITE (29)..(29): Xaa can be any naturally occurring amino acid
  SITE (31)..(31): Xaa can be any naturally occurring amino acid except Pro or Gly
  SITE (32)..(32): Xaa can be any naturally occurring amino acid except Pro or Gly
  SITE (33)..(33): Xaa can be any naturally occurring amino acid except Pro or Gly
  SITE (34)..(34): Xaa can be any naturally occurring amino acid except Pro or Gly
  SITE (36)..(36): Xaa can be any naturally occurring amino acid
  SITE (37)..(37): Xaa can be any naturally occurring amino acid
  SITE (38)..(38): Xaa can be any naturally occurring amino acid
  SITE (40)..(40): Xaa can be any naturally occurring amino acid except Pro or Gly
  SITE (41)..(41): Xaa can be any naturally occurring amino acid except Pro or Gly
  SITE (42)..(42): Xaa can be any naturally occurring amino acid except Pro or Gly
  SITE (43)..(43): Xaa can be any naturally occurring amino acid except Pro or Gly
  SITE (45)..(45): Xaa can be any naturally occurring amino acid
  SITE (46)..(46): Xaa can be any naturally occurring amino acid
  SITE (47)..(47): Xaa can be any naturally occurring amino acid
  SITE (49)..(49): Xaa can be any naturally occurring amino acid except Pro or Gly
  SITE (50)..(50): Xaa can be any naturally occurring amino acid except Pro or Gly
  SITE (51)..(51): Xaa can be any naturally occurring amino acid except Pro or Gly
  SITE (52)..(52): Xaa can be any naturally occurring amino acid except Pro or Gly
  SITE (54)..(54): Xaa can be any naturally occurring amino acid
  SITE (55)..(55): Xaa can be any naturally occurring amino acid
  SITE (56)..(56): Xaa can be any naturally occurring amino acid
  SITE (58)..(58): Xaa can be any naturally occurring amino acid except Pro or Gly
  SITE (59)..(59): Xaa can be any naturally occurring amino acid except Pro or Gly
  SITE (60)..(60): Xaa can be any naturally occurring amino acid except Pro or Gly
  SITE (61)..(61): Xaa can be any naturally occurring amino acid except Pro or Gly
  SITE (63)..(63): Xaa can be any naturally occurring amino acid
  SITE (64)..(64): Xaa can be any naturally occurring amino acid
  SITE (65)..(65): Xaa can be any naturally occurring amino acid
  SITE (67)..(67): Xaa can be any naturally occurring amino acid except Pro or Gly
  SITE (68)..(68): Xaa can be any naturally occurring amino acid except Pro or Gly
  SITE (69)..(69): Xaa can be any naturally occurring amino acid except Pro or Gly
  SITE (70)..(70): Xaa can be any naturally occurring amino acid except Pro or Gly
  SITE (72)..(72): Xaa can be any naturally occurring amino acid
  SITE (73)..(73): Xaa can be any naturally occurring amino acid
  SITE (74)..(74): Xaa can be any naturally occurring amino acid
  SITE (76)..(76): Xaa can be any naturally occurring amino acid except Pro or Gly
  SITE (77)..(77): Xaa can be any naturally occurring amino acid except Pro or Gly
  SITE (78)..(78): Xaa can be any naturally occurring amino acid except Pro or Gly
  SITE (79)..(79): Xaa can be any naturally occurring amino acid except Pro or Gly
  SITE (81)..(81): Xaa can be any naturally occurring amino acid
  SITE (82)..(82): Xaa can be any naturally occurring amino acid
  SITE (83)..(83): Xaa can be any naturally occurring amino acid
  SITE (85)..(85): Xaa can be any naturally occurring amino acid except Pro or Gly
  SITE (86)..(86): Xaa can be any naturally occurring amino acid except Pro or Gly
  SITE (87)..(87): Xaa can be any naturally occurring amino acid except Pro or Gly
  SITE (88)..(88): Xaa can be any naturally occurring amino acid except Pro or Gly
  SITE (90)..(90): Xaa can be any naturally occurring amino acid
  SITE (91)..(1440): May be present or absent in groups of the repeat unit Xaa Xaa Pro Xaa Xaa Xaa Xaa Gly Xaa
  SITE (91)..(91): Xaa can be any naturally occurring amino acid
  SITE (92)..(92): Xaa can be any naturally occurring amino acid
  SITE (94)..(94): Xaa can be any naturally occurring amino acid except Pro or Gly
  SITE (95)..(95): Xaa can be any naturally occurring amino acid except Pro or Gly
  SITE (96)..(96): Xaa can be any naturally occurring amino acid except Pro or Gly
  SITE (97)..(97): Xaa can be any naturally occurring amino acid except Pro or Gly
  SITE (99)..(99): Xaa can be any naturally occurring amino acid
  SITE (100)..(100): Xaa can be any naturally occurring amino acid
  SITE (101)..(101): Xaa can be any naturally occurring amino acid
  SITE (103)..(103): Xaa can be any naturally occurring amino acid except Pro or Gly
  SITE (104)..(104): Xaa can be any naturally occurring amino acid except Pro or Gly
  SITE (105)..(105): Xaa can be any naturally occurring amino acid except Pro or Gly
  SITE (106)..(106): Xaa can be any naturally occurring amino acid except Pro or Gly
  SITE (108)..(108): Xaa can be any naturally occurring amino acid
  SITE (109)..(109): Xaa can be any naturally occurring amino acid
  SITE (110)..(110): Xaa can be any naturally occurring amino acid
  SITE (112)..(112): Xaa can be any naturally occurring amino acid except Pro or Gly
  SITE (113)..(113): Xaa can be any naturally occurring amino acid except Pro or Gly
  SITE (114)..(114): Xaa can be any naturally occurring amino acid except Pro or Gly
  SITE (115)..(115): Xaa can be any naturally occurring amino acid except Pro or Gly
  SITE (117)..(117): Xaa can be any naturally occurring amino acid
  SITE (118)..(118): Xaa can be any naturally occurring amino acid
  SITE (119)..(119): Xaa can be any naturally occurring amino acid
  SITE (121)..(121): Xaa can be any naturally occurring amino acid except Pro or Gly
  SITE (122)..(122): Xaa can be any naturally occurring amino acid except Pro or Gly
  SITE (123)..(123): Xaa can be any naturally occurring amino acid except Pro or Gly
  SITE (124)..(124): Xaa can be any naturally occurring amino acid except Pro or Gly
  SITE (126)..(126): Xaa can be any naturally occurring amino acid
  SITE (127)..(127): Xaa can be any naturally occurring amino acid
  SITE (128)..(128): Xaa can be any naturally occurring amino acid
  SITE (130)..(130): Xaa can be any naturally occurring amino acid except Pro or Gly
  SITE (131)..(131): Xaa can be any naturally occurring amino acid except Pro or Gly
  SITE (132)..(132): Xaa can be any naturally occurring amino acid except Pro or Gly
  SITE (133)..(133): Xaa can be any naturally occurring amino acid except Pro or Gly
  SITE (135)..(135): Xaa can be any naturally occurring amino acid
  SITE (136)..(136): Xaa can be any naturally occurring amino acid
  SITE (137)..(137): Xaa can be any naturally occurring amino acid
  SITE (139)..(139): Xaa can be any naturally occurring amino acid except Pro or Gly
  SITE (140)..(140): Xaa can be any naturally occurring amino acid except Pro or Gly
  SITE (141)..(141): Xaa can be any naturally occurring amino acid except Pro or Gly
  SITE (142)..(142): Xaa can be any naturally occurring amino acid except Pro or Gly
  SITE (144)..(144): Xaa can be any naturally occurring amino acid
  SITE (145)..(145): Xaa can be any naturally occurring amino acid
  SITE (146)..(146): Xaa can be any naturally occurring amino acid
  SITE (148)..(148): Xaa can be any naturally occurring amino acid except Pro or Gly
  SITE (149)..(149): Xaa can be any naturally occurring amino acid except Pro or Gly
  SITE (150)..(150): Xaa can be any naturally occurring amino acid except Pro or Gly
  SITE (151)..(151): Xaa can be any naturally occurring amino acid except Pro or Gly
  SITE (153)..(153): Xaa can be any naturally occurring amino acid
  SITE (154)..(154): Xaa can be any naturally occurring amino acid
  SITE (155)..(155): Xaa can be any naturally occurring amino acid
  SITE (157)..(157): Xaa can be any naturally occurring amino acid except Pro or Gly
  SITE (158)..(158): Xaa can be any naturally occurring amino acid except Pro or Gly
  SITE (159)..(159): Xaa can be any naturally occurring amino acid except Pro or Gly
  SITE (160)..(160): Xaa can be any naturally occurring amino acid except Pro or Gly
  SITE (162)..(162): Xaa can be any naturally occurring amino acid
  SITE (163)..(163): Xaa can be any naturally occurring amino acid
  SITE (164)..(164): Xaa can be any naturally occurring amino acid
  SITE (166)..(166): Xaa can be any naturally occurring amino acid except Pro or Gly
  SITE (167)..(167): Xaa can be any naturally occurring amino acid except Pro or Gly
  SITE (168)..(168): Xaa can be any naturally occurring amino acid except Pro or Gly
  SITE (169)..(169): Xaa can be any naturally occurring amino acid except Pro or Gly
  SITE (171)..(171): Xaa can be any naturally occurring amino acid
  SITE (172)..(172): Xaa can be any naturally occurring amino acid
  SITE (173)..(173): Xaa can be any naturally occurring amino acid
  SITE (175)..(175): Xaa can be any naturally occurring amino acid except Pro or Gly
  SITE (176)..(176): Xaa can be any naturally occurring amino acid except Pro or Gly
  SITE (177)..(177): Xaa can be any naturally occurring amino acid except Pro or Gly
  SITE (178)..(178): Xaa can be any naturally occurring amino acid except Pro or Gly
  SITE (180)..(180): Xaa can be any naturally occurring amino acid
  SITE (181)..(181): Xaa can be any naturally occurring amino acid
  SITE (182)..(182): Xaa can be any naturally occurring amino acid
  SITE (184)..(184): Xaa can be any naturally occurring amino acid except Pro or Gly
  SITE (185)..(185): Xaa can be any naturally occurring amino acid except Pro or Gly
  SITE (186)..(186): Xaa can be any naturally occurring amino acid except Pro or Gly
  SITE (187)..(187): Xaa can be any naturally occurring amino acid except Pro or Gly
  SITE (189)..(189): Xaa can be any naturally occurring amino acid
  SITE (190)..(190): Xaa can be any naturally occurring amino acid
  SITE (191)..(191): Xaa can be any naturally occurring amino acid
  SITE (193)..(193): Xaa can be any naturally occurring amino acid except Pro or Gly
  SITE (194)..(194): Xaa can be any naturally occurring amino acid except Pro or Gly
  SITE (195)..(195): Xaa can be any naturally occurring amino acid except Pro or Gly
  SITE (196)..(196): Xaa can be any naturally occurring amino acid except Pro or Gly
  SITE (198)..(198): Xaa can be any naturally occurring amino acid
  SITE (199)..(199): Xaa can be any naturally occurring amino acid
  SITE (200)..(200): Xaa can be any naturally occurring amino acid
  SITE (202)..(202): Xaa can be any naturally occurring amino acid except Pro or Gly
  SITE (203)..(203): Xaa can be any naturally occurring amino acid except Pro or Gly
  SITE (204)..(204): Xaa can be any naturally occurring amino acid except Pro or Gly
  SITE (205)..(205): Xaa can be any naturally occurring amino acid except Pro or Gly
  SITE (207)..(207): Xaa can be any naturally occurring amino acid
  SITE (208)..(208): Xaa can be any naturally occurring amino acid
  SITE (209)..(209): Xaa can be any naturally occurring amino acid
  SITE (211)..(211): Xaa can be any naturally occurring amino acid except Pro or Gly
  SITE (212)..(212): Xaa can be any naturally occurring amino acid except Pro or Gly
  SITE (213)..(213): Xaa can be any naturally occurring amino acid except Pro or Gly
  SITE (214)..(214): Xaa can be any naturally occurring amino acid except Pro or Gly
  SITE (216)..(216): Xaa can be any naturally occurring amino acid
  SITE (217)..(217): Xaa can be any naturally occurring amino acid
  SITE (218)..(218): Xaa can be any naturally occurring amino acid
  SITE (220)..(220): Xaa can be any naturally occurring amino acid except Pro or Gly
  SITE (221)..(221): Xaa can be any naturally occurring amino acid except Pro or Gly
  SITE (222)..(222): Xaa can be any naturally occurring amino acid except Pro or Gly
  SITE (223)..(223): Xaa can be any naturally occurring amino acid except Pro or Gly
  SITE (225)..(225): Xaa can be any naturally occurring amino acid
  SITE (226)..(226): Xaa can be any naturally occurring amino acid
  SITE (227)..(227): Xaa can be any naturally occurring amino acid
  SITE (229)..(229): Xaa can be any naturally occurring amino acid except Pro or Gly
  SITE (230)..(230): Xaa can be any naturally occurring amino acid except Pro or Gly
  SITE (231)..(231): Xaa can be any naturally occurring amino acid except Pro or Gly
  SITE (232)..(232): Xaa can be any naturally occurring amino acid except Pro or Gly
  SITE (234)..(234): Xaa can be any naturally occurring amino acid
  SITE (235)..(235): Xaa can be any naturally occurring amino acid
  SITE (236)..(236): Xaa can be any naturally occurring amino acid
  SITE (238)..(238): Xaa can be any naturally occurring amino acid except Pro or Gly
  SITE (239)..(239): Xaa can be any naturally occurring amino acid except Pro or Gly
  SITE (240)..(240): Xaa can be any naturally occurring amino acid except Pro or Gly
  SITE (241)..(241): Xaa can be any naturally occurring amino acid except Pro or Gly
  SITE (243)..(243): Xaa can be any naturally occurring amino acid
  SITE (244)..(244): Xaa can be any naturally occurring amino acid
  SITE (245)..(245): Xaa can be any naturally occurring amino acid
  SITE (247)..(247): Xaa can be any naturally occurring amino acid except Pro or Gly
  SITE (248)..(248): Xaa can be any naturally occurring amino acid except Pro or Gly
  SITE (249)..(249): Xaa can be any naturally occurring amino acid except Pro or Gly
  SITE (250)..(250): Xaa can be any naturally occurring amino acid except Pro or Gly
  SITE (252)..(252): Xaa can be any naturally occurring amino acid
  SITE (253)..(253): Xaa can be any naturally occurring amino acid
  SITE (254)..(254): Xaa can be any naturally occurring amino acid
  SITE (256)..(256): Xaa can be any naturally occurring amino acid except Pro or Gly
  SITE (257)..(257): Xaa can be any naturally occurring amino acid except Pro or Gly
  SITE (258)..(258): Xaa can be any naturally occurring amino acid except Pro or Gly
  SITE (259)..(259): Xaa can be any naturally occurring amino acid except Pro or Gly
  SITE (261)..(261): Xaa can be any naturally occurring amino acid
  SITE (262)..(262): Xaa can be any naturally occurring amino acid
  SITE (263)..(263): Xaa can be any naturally occurring amino acid
  SITE (265)..(265): Xaa can be any naturally occurring amino acid except Pro or Gly
  SITE (266)..(266): Xaa can be any naturally occurring amino acid except Pro or Gly
  SITE (267)..(267): Xaa can be any naturally occurring amino acid except Pro or Gly
  SITE (268)..(268): Xaa can be any naturally occurring amino acid except Pro or Gly
  SITE (270)..(270): Xaa can be any naturally occurring amino acid
  SITE (271)..(271): Xaa can be any naturally occurring amino acid
  SITE (272)..(272): Xaa can be any naturally occurring amino acid
  SITE (274)..(274): Xaa can be any naturally occurring amino acid except Pro or Gly
  SITE (275)..(275): Xaa can be any naturally occurring amino acid except Pro or Gly
  SITE (276)..(276): Xaa can be any naturally occurring amino acid except Pro or Gly
  SITE (277)..(277): Xaa can be any naturally occurring amino acid except Pro or Gly
  SITE (279)..(279): Xaa can be any naturally occurring amino acid
  SITE (280)..(280): Xaa can be any naturally occurring amino acid
  SITE (281)..(281): Xaa can be any naturally occurring amino acid
  SITE (283)..(283): Xaa can be any naturally occurring amino acid except Pro or Gly
  SITE (284)..(284): Xaa can be any naturally occurring amino acid except Pro or Gly
  SITE (285)..(285): Xaa can be any naturally occurring amino acid except Pro or Gly
  SITE (286)..(286): Xaa can be any naturally occurring amino acid except Pro or Gly
  SITE (288)..(288): Xaa can be any naturally occurring amino acid
  SITE (289)..(289): Xaa can be any naturally occurring amino acid
  SITE (290)..(290): Xaa can be any naturally occurring amino acid
  SITE (292)..(292): Xaa can be any naturally occurring amino acid except Pro or Gly
  SITE (293)..(293): Xaa can be any naturally occurring amino acid except Pro or Gly
  SITE (294)..(294): Xaa can be any naturally occurring amino acid except Pro or Gly
  SITE (295)..(295): Xaa can be any naturally occurring amino acid except Pro or Gly
  SITE (297)..(297): Xaa can be any naturally occurring amino acid
  SITE (298)..(298): Xaa can be any naturally occurring amino acid
  SITE (299)..(299): Xaa can be any naturally occurring amino acid
  SITE (301)..(301): Xaa can be any naturally occurring amino acid except Pro or Gly
  SITE (302)..(302): Xaa can be any naturally occurring amino acid except Pro or Gly
  SITE (303)..(303): Xaa can be any naturally occurring amino acid except Pro or Gly
  SITE (304)..(304): Xaa can be any naturally occurring amino acid except Pro or Gly
  SITE (306)..(306): Xaa can be any naturally occurring amino acid
  SITE (307)..(307): Xaa can be any naturally occurring amino acid
  SITE (308)..(308): Xaa can be any naturally occurring amino acid
  SITE (310)..(310): Xaa can be any naturally occurring amino acid except Pro or Gly
  SITE (311)..(311): Xaa can be any naturally occurring amino acid except Pro or Gly
  SITE (312)..(312): Xaa can be any naturally occurring amino acid except Pro or Gly
  SITE (313)..(313): Xaa can be any naturally occurring amino acid except Pro or Gly
  SITE (315)..(315): Xaa can be any naturally occurring amino acid
  SITE (316)..(316): Xaa can be any naturally occurring amino acid
  SITE (317)..(317): Xaa can be any naturally occurring amino acid
  SITE (319)..(319): Xaa can be any naturally occurring amino acid except Pro or Gly
  SITE (320)..(320): Xaa can be any naturally occurring amino acid except Pro or Gly
  SITE (321)..(321): Xaa can be any naturally occurring amino acid except Pro or Gly
  SITE (322)..(322): Xaa can be any naturally occurring amino acid except Pro or Gly
  SITE (324)..(324): Xaa can be any naturally occurring amino acid
  SITE (325)..(325): Xaa can be any naturally occurring amino acid
  SITE (326)..(326): Xaa can be any naturally occurring amino acid
  SITE (328)..(328): Xaa can be any naturally occurring amino acid except Pro or Gly
  SITE (329)..(329): Xaa can be any naturally occurring amino acid except Pro or Gly
  SITE (330)..(330): Xaa can be any naturally occurring amino acid except Pro or Gly
  SITE (331)..(331): Xaa can be any naturally occurring amino acid except Pro or Gly
  SITE (333)..(333): Xaa can be any naturally occurring amino acid
  SITE (334)..(334): Xaa can be any naturally occurring amino acid
  SITE (335)..(335): Xaa can be any naturally occurring amino acid
  SITE (337)..(337): Xaa can be any naturally occurring amino acid except Pro or Gly
  SITE (338)..(338): Xaa can be any naturally occurring amino acid except Pro or Gly
  SITE (339)..(339): Xaa can be any naturally occurring amino acid except Pro or Gly
  SITE (340)..(340): Xaa can be any naturally occurring amino acid except Pro or Gly
  SITE (342)..(342): Xaa can be any naturally occurring amino acid
  SITE (343)..(343): Xaa can be any naturally occurring amino acid
  SITE (344)..(344): Xaa can be any naturally occurring amino acid
  SITE (346)..(346): Xaa can be any naturally occurring amino acid except Pro or Gly
  SITE (347)..(347): Xaa can be any naturally occurring amino acid except Pro or Gly
  SITE (348)..(348): Xaa can be any naturally occurring amino acid except Pro or Gly
  SITE (349)..(349): Xaa can be any naturally occurring amino acid except Pro or Gly
  SITE (351)..(351): Xaa can be any naturally occurring amino acid
  SITE (352)..(352): Xaa can be any naturally occurring amino acid
  SITE (353)..(353): Xaa can be any naturally occurring amino acid
  SITE (355)..(355): Xaa can be any naturally occurring amino acid except Pro or Gly
  SITE (356)..(356): Xaa can be any naturally occurring amino acid except Pro or Gly
  SITE (357)..(357): Xaa can be any naturally occurring amino acid except Pro or Gly
  SITE (358)..(358): Xaa can be any naturally occurring amino acid except Pro or Gly
  SITE (360)..(360): Xaa can be any naturally occurring amino acid
  SITE (361)..(361): Xaa can be any naturally occurring amino acid
  SITE (362)..(362): Xaa can be any naturally occurring amino acid
  SITE (364)..(364): Xaa can be any naturally occurring amino acid except Pro or Gly
  SITE (365)..(365): Xaa can be any naturally occurring amino acid except Pro or Gly
  SITE (366)..(366): Xaa can be any naturally occurring amino acid except Pro or Gly
  SITE (367)..(367): Xaa can be any naturally occurring amino acid except Pro or Gly
  SITE (369)..(369): Xaa can be any naturally occurring amino acid
  SITE (370)..(370): Xaa can be any naturally occurring amino acid
  SITE (371)..(371): Xaa can be any naturally occurring amino acid
  SITE (373)..(373): Xaa can be any naturally occurring amino acid except Pro or Gly
  SITE (374)..(374): Xaa can be any naturally occurring amino acid except Pro or Gly
  SITE (375)..(375): Xaa can be any naturally occurring amino acid except Pro or Gly
  SITE (376)..(376): Xaa can be any naturally occurring amino acid except Pro or Gly
  SITE (378)..(378): Xaa can be any naturally occurring amino acid
  SITE (379)..(379): Xaa can be any naturally occurring amino acid
  SITE (380)..(380): Xaa can be any naturally occurring amino acid
  SITE (382)..(382): Xaa can be any naturally occurring amino acid except Pro or Gly
  SITE (383)..(383): Xaa can be any naturally occurring amino acid except Pro or Gly
  SITE (384)..(384): Xaa can be any naturally occurring amino acid except Pro or Gly
  SITE (385)..(385): Xaa can be any naturally occurring amino acid except Pro or Gly
  SITE (387)..(387): Xaa can be any naturally occurring amino acid
  SITE (388)..(388): Xaa can be any naturally occurring amino acid
  SITE (389)..(389): Xaa can be any naturally occurring amino acid
  SITE (391)..(391): Xaa can be any naturally occurring amino acid except Pro or Gly
  SITE (392)..(392): Xaa can be any naturally occurring amino acid except Pro or Gly
  SITE (393)..(393): Xaa can be any naturally occurring amino acid except Pro or Gly
  SITE (394)..(394): Xaa can be any naturally occurring amino acid except Pro or Gly
  SITE (396)..(396): Xaa can be any naturally occurring amino acid
  SITE (397)..(397): Xaa can be any naturally occurring amino acid
  SITE (398)..(398): Xaa can be any naturally occurring amino acid
  SITE (400)..(400): Xaa can be any naturally occurring amino acid except Pro or Gly
  SITE (401)..(401): Xaa can be any naturally occurring amino acid except Pro or Gly
  SITE (402)..(402): Xaa can be any naturally occurring amino acid except Pro or Gly
  SITE (403)..(403): Xaa can be any naturally occurring amino acid except Pro or Gly
  SITE (405)..(405): Xaa can be any naturally occurring amino acid
  SITE (406)..(406): Xaa can be any naturally occurring amino acid
  SITE (407)..(407): Xaa can be any naturally occurring amino acid
  SITE (409)..(409): Xaa can be any naturally occurring amino acid except Pro or Gly
  SITE (410)..(410): Xaa can be any naturally occurring amino acid except Pro or Gly
  SITE (411)..(411): Xaa can be any naturally occurring amino acid except Pro or Gly
  SITE (412)..(412): Xaa can be any naturally occurring amino acid except Pro or Gly
  SITE (414)..(414): Xaa can be any naturally occurring amino acid
  SITE (415)..(415): Xaa can be any naturally occurring amino acid
  SITE (416)..(416): Xaa can be any naturally occurring amino acid
  SITE (418)..(418): Xaa can be any naturally occurring amino acid except Pro or Gly
  SITE (419)..(419): Xaa can be any naturally occurring amino acid except Pro or Gly
  SITE (420)..(420): Xaa can be any naturally occurring amino acid except Pro or Gly
  SITE (421)..(421): Xaa can be any naturally occurring amino acid except Pro or Gly
  SITE (423)..(423): Xaa can be any naturally occurring amino acid
  SITE (424)..(424): Xaa can be any naturally occurring amino acid
  SITE (425)..(425): Xaa can be any naturally occurring amino acid
  SITE (427)..(427): Xaa can be any naturally occurring amino acid except Pro or Gly
  SITE (428)..(428): Xaa can be any naturally occurring amino acid except Pro or Gly
  SITE (429)..(429): Xaa can be any naturally occurring amino acid except Pro or Gly
  SITE (430)..(430): Xaa can be any naturally occurring amino acid except Pro or Gly
  SITE (432)..(432): Xaa can be any naturally occurring amino acid
  SITE (433)..(433): Xaa can be any naturally occurring amino acid
  SITE (434)..(434): Xaa can be any naturally occurring amino acid
  SITE (436)..(436): Xaa can be any naturally occurring amino acid except Pro or Gly
  SITE (437)..(437): Xaa can be any naturally occurring amino acid except Pro or Gly
  SITE (438)..(438): Xaa can be any naturally occurring amino acid except Pro or Gly
  SITE (439)..(439): Xaa can be any naturally occurring amino acid except Pro or Gly
  SITE (441)..(441): Xaa can be any naturally occurring amino acid
  SITE (442)..(442): Xaa can be any naturally occurring amino acid
  SITE (443)..(443): Xaa can be any naturally occurring amino acid
  SITE (445)..(445): Xaa can be any naturally occurring amino acid except Pro or Gly
  SITE (446)..(446): Xaa can be any naturally occurring amino acid except Pro or Gly
  SITE (447)..(447): Xaa can be any naturally occurring amino acid except Pro or Gly
  SITE (448)..(448): Xaa can be any naturally occurring amino acid except Pro or Gly
  SITE (450)..(450): Xaa can be any naturally occurring amino acid
  SITE (451)..(451): Xaa can be any naturally occurring amino acid
  SITE (452)..(452): Xaa can be any naturally occurring amino acid
  SITE (454)..(454): Xaa can be any naturally occurring amino acid except Pro or Gly
  SITE (455)..(455): Xaa can be any naturally occurring amino acid except Pro or Gly
  SITE (456)..(456): Xaa can be any naturally occurring amino acid except Pro or Gly
  SITE (457)..(457): Xaa can be any naturally occurring amino acid except Pro or Gly
  SITE (459)..(459): Xaa can be any naturally occurring amino acid
  SITE (460)..(460): Xaa can be any naturally occurring amino acid
  SITE (461)..(461): Xaa can be any naturally occurring amino acid
  SITE (463)..(463): Xaa can be any naturally occurring amino acid except Pro or Gly
  SITE (464)..(464): Xaa can be any naturally occurring amino acid except Pro or Gly
  SITE (465)..(465): Xaa can be any naturally occurring amino acid except Pro or Gly
  SITE (466)..(466): Xaa can be any naturally occurring amino acid except Pro or Gly
  SITE (468)..(468): Xaa can be any naturally occurring amino acid
  SITE (469)..(469): Xaa can be any naturally occurring amino acid
  SITE (470)..(470): Xaa can be any naturally occurring amino acid
  SITE (472)..(472): Xaa can be any naturally occurring amino acid except Pro or Gly
  SITE (473)..(473): Xaa can be any naturally occurring amino acid except Pro or Gly
  SITE (474)..(474): Xaa can be any naturally occurring amino acid except Pro or Gly
  SITE (475)..(475): Xaa can be any naturally occurring amino acid except Pro or Gly
  SITE (477)..(477): Xaa can be any naturally occurring amino acid
  SITE (478)..(478): Xaa can be any naturally occurring amino acid
  SITE (479)..(479): Xaa can be any naturally occurring amino acid
  SITE (481)..(481): Xaa can be any naturally occurring amino acid except Pro or Gly
  SITE (482)..(482): Xaa can be any naturally occurring amino acid except Pro or Gly
  SITE (483)..(483): Xaa can be any naturally occurring amino acid except Pro or Gly
  SITE (484)..(484): Xaa can be any naturally occurring amino acid except Pro or Gly
  SITE (486)..(486): Xaa can be any naturally occurring amino acid
  SITE (487)..(487): Xaa can be any naturally occurring amino acid
  SITE (488)..(488): Xaa can be any naturally occurring amino acid
  SITE (490)..(490): Xaa can be any naturally occurring amino acid except Pro or Gly
  SITE (491)..(491): Xaa can be any naturally occurring amino acid except Pro or Gly
  SITE (492)..(492): Xaa can be any naturally occurring amino acid except Pro or Gly
  SITE (493)..(493): Xaa can be any naturally occurring amino acid except Pro or Gly
  SITE (495)..(495): Xaa can be any naturally occurring amino acid
  SITE (496)..(496): Xaa can be any naturally occurring amino acid
  SITE (497)..(497): Xaa can be any naturally occurring amino acid
  SITE (499)..(499): Xaa can be any naturally occurring amino acid except Pro or Gly
  SITE (500)..(500): Xaa can be any naturally occurring amino acid except Pro or Gly
  SITE (501)..(501): Xaa can be any naturally occurring amino acid except Pro or Gly
  SITE (502)..(502): Xaa can be any naturally occurring amino acid except Pro or Gly
  SITE (504)..(504): Xaa can be any naturally occurring amino acid
  SITE (505)..(505): Xaa can be any naturally occurring amino acid
  SITE (506)..(506): Xaa can be any naturally occurring amino acid
  SITE (508)..(508): Xaa can be any naturally occurring amino acid except Pro or Gly
  SITE (509)..(509): Xaa can be any naturally occurring amino acid except Pro or Gly
  SITE (510)..(510): Xaa can be any naturally occurring amino acid except Pro or Gly
  SITE (511)..(511): Xaa can be any naturally occurring amino acid except Pro or Gly
  SITE (513)..(513): Xaa can be any naturally occurring amino acid
  SITE (514)..(514): Xaa can be any naturally occurring amino acid
  SITE (515)..(515): Xaa can be any naturally occurring amino acid
  SITE (517)..(517): Xaa can be any naturally occurring amino acid except Pro or Gly
  SITE (518)..(518): Xaa can be any naturally occurring amino acid except Pro or Gly
  SITE (519)..(519): Xaa can be any naturally occurring amino acid except Pro or Gly
  SITE (520)..(520): Xaa can be any naturally occurring amino acid except Pro or Gly
  SITE (522)..(522): Xaa can be any naturally occurring amino acid
  SITE (523)..(523): Xaa can be any naturally occurring amino acid
  SITE (524)..(524): Xaa can be any naturally occurring amino acid
  SITE (526)..(526): Xaa can be any naturally occurring amino acid except Pro or Gly
  SITE (527)..(527): Xaa can be any naturally occurring amino acid except Pro or Gly
  SITE (528)..(528): Xaa can be any naturally occurring amino acid except Pro or Gly
  SITE (529)..(529): Xaa can be any naturally occurring amino acid except Pro or Gly
  SITE (531)..(531): Xaa can be any naturally occurring amino acid
  SITE (532)..(532): Xaa can be any naturally occurring amino acid
  SITE (533)..(533): Xaa can be any naturally occurring amino acid
  SITE (535)..(535): Xaa can be any naturally occurring amino acid except Pro or Gly
  SITE (536)..(536): Xaa can be any naturally occurring amino acid except Pro or Gly
  SITE (537)..(537): Xaa can be any naturally occurring amino acid except Pro or Gly
  SITE (538)..(538): Xaa can be any naturally occurring amino acid except Pro or Gly
  SITE (540)..(540): Xaa can be any naturally occurring amino acid
  SITE (541)..(541): Xaa can be any naturally occurring amino acid
  SITE (542)..(542): Xaa can be any naturally occurring amino acid
  SITE (544)..(544): Xaa can be any naturally occurring amino acid except Pro or Gly
  SITE (545)..(545): Xaa can be any naturally occurring amino acid except Pro or Gly
  SITE (546)..(546): Xaa can be any naturally occurring amino acid except Pro or Gly
  SITE (547)..(547): Xaa can be any naturally occurring amino acid except Pro or Gly
  SITE (549)..(549): Xaa can be any naturally occurring amino acid
  SITE (550)..(550): Xaa can be any naturally occurring amino acid
  SITE (551)..(551): Xaa can be any naturally occurring amino acid
  SITE (553)..(553): Xaa can be any naturally occurring amino acid except Pro or Gly
  SITE (554)..(554): Xaa can be any naturally occurring amino acid except Pro or Gly
  SITE (555)..(555): Xaa can be any naturally occurring amino acid except Pro or Gly
  SITE (556)..(556): Xaa can be any naturally occurring amino acid except Pro or Gly
  SITE (558)..(558): Xaa can be any naturally occurring amino acid
  SITE (559)..(559): Xaa can be any naturally occurring amino acid
  SITE (560)..(560): Xaa can be any naturally occurring amino acid
  SITE (562)..(562): Xaa can be any naturally occurring amino acid except Pro or Gly
  SITE (563)..(563): Xaa can be any naturally occurring amino acid except Pro or Gly
  SITE (564)..(564): Xaa can be any naturally occurring amino acid except Pro or Gly
  SITE (565)..(565): Xaa can be any naturally occurring amino acid except Pro or Gly
  SITE (567)..(567): Xaa can be any naturally occurring amino acid
  SITE (568)..(568): Xaa can be any naturally occurring amino acid
  SITE (569)..(569): Xaa can be any naturally occurring amino acid
  SITE (571)..(571): Xaa can be any naturally occurring amino acid except Pro or Gly
  SITE (572)..(572): Xaa can be any naturally occurring amino acid except Pro or Gly
  SITE (573)..(573): Xaa can be any naturally occurring amino acid except Pro or Gly
  SITE (574)..(574): Xaa can be any naturally occurring amino acid except Pro or Gly
  SITE (576)..(576): Xaa can be any naturally occurring amino acid
  SITE (577)..(577): Xaa can be any naturally occurring amino acid
  SITE (578)..(578): Xaa can be any naturally occurring amino acid
  SITE (580)..(580): Xaa can be any naturally occurring amino acid except Pro or Gly
  SITE (581)..(581): Xaa can be any naturally occurring amino acid except Pro or Gly
  SITE (582)..(582): Xaa can be any naturally occurring amino acid except Pro or Gly
  SITE (583)..(583): Xaa can be any naturally occurring amino acid except Pro or Gly
  SITE (585)..(585): Xaa can be any naturally occurring amino acid
  SITE (586)..(586): Xaa can be any naturally occurring amino acid
  SITE (587)..(587): Xaa can be any naturally occurring amino acid
  SITE (589)..(589): Xaa can be any naturally occurring amino acid except Pro or Gly
  SITE (590)..(590): Xaa can be any naturally occurring amino acid except Pro or Gly
  SITE (591)..(591): Xaa can be any naturally occurring amino acid except Pro or Gly
  SITE (592)..(592): Xaa can be any naturally occurring amino acid except Pro or Gly
  SITE (594)..(594): Xaa can be any naturally occurring amino acid
  SITE (595)..(595): Xaa can be any naturally occurring amino acid
  SITE (596)..(596): Xaa can be any naturally occurring amino acid
  SITE (598)..(598): Xaa can be any naturally occurring amino acid except Pro or Gly
  SITE (599)..(599): Xaa can be any naturally occurring amino acid except Pro or Gly
  SITE (600)..(600): Xaa can be any naturally occurring amino acid except Pro or Gly
  SITE (601)..(601): Xaa can be any naturally occurring amino acid except Pro or Gly
  SITE (603)..(603): Xaa can be any naturally occurring amino acid
  SITE (604)..(604): Xaa can be any naturally occurring amino acid
  SITE (605)..(605): Xaa can be any naturally occurring amino acid
  SITE (607)..(607): Xaa can be any naturally occurring amino acid except Pro or Gly
  SITE (608)..(608): Xaa can be any naturally occurring amino acid except Pro or Gly
  SITE (609)..(609): Xaa can be any naturally occurring amino acid except Pro or Gly
  SITE (610)..(610): Xaa can be any naturally occurring amino acid except Pro or Gly
  SITE (612)..(612): Xaa can be any naturally occurring amino acid
  SITE (613)..(613): Xaa can be any naturally occurring amino acid
  SITE (614)..(614): Xaa can be any naturally occurring amino acid
  SITE (616)..(616): Xaa can be any naturally occurring amino acid except Pro or Gly
  SITE (617)..(617): Xaa can be any naturally occurring amino acid except Pro or Gly
  SITE (618)..(618): Xaa can be any naturally occurring amino acid except Pro or Gly
  SITE (619)..(619): Xaa can be any naturally occurring amino acid except Pro or Gly
  SITE (621)..(621): Xaa can be any naturally occurring amino acid
  SITE (622)..(622): Xaa can be any naturally occurring amino acid
  SITE (623)..(623): Xaa can be any naturally occurring amino acid
  SITE (625)..(625): Xaa can be any naturally occurring amino acid except Pro or Gly
  SITE (626)..(626): Xaa can be any naturally occurring amino acid except Pro or Gly
  SITE (627)..(627): Xaa can be any naturally occurring amino acid except Pro or Gly
  SITE (628)..(628): Xaa can be any naturally occurring amino acid except Pro or Gly
  SITE (630)..(630): Xaa can be any naturally occurring amino acid
  SITE (631)..(631): Xaa can be any naturally occurring amino acid
  SITE (632)..(632): Xaa can be any naturally occurring amino acid
  SITE (634)..(634): Xaa can be any naturally occurring amino acid except Pro or Gly
  SITE (635)..(635): Xaa can be any naturally occurring amino acid except Pro or Gly
  SITE (636)..(636): Xaa can be any naturally occurring amino acid except Pro or Gly
  SITE (637)..(637): Xaa can be any naturally occurring amino acid except Pro or Gly
  SITE (639)..(639): Xaa can be any naturally occurring amino acid
  SITE (640)..(640): Xaa can be any naturally occurring amino acid
  SITE (641)..(641): Xaa can be any naturally occurring amino acid
  SITE (643)..(643): Xaa can be any naturally occurring amino acid except Pro or Gly
  SITE (644)..(644): Xaa can be any naturally occurring amino acid except Pro or Gly
  SITE (645)..(645): Xaa can be any naturally occurring amino acid except Pro or Gly
  SITE (646)..(646): Xaa can be any naturally occurring amino acid except Pro or Gly
  SITE (648)..(648): Xaa can be any naturally occurring amino acid
  SITE (649)..(649): Xaa can be any naturally occurring amino acid
  SITE (650)..(650): Xaa can be any naturally occurring amino acid
  SITE (652)..(652): Xaa can be any naturally occurring amino acid except Pro or Gly
  SITE (653)..(653): Xaa can be any naturally occurring amino acid except Pro or Gly
  SITE (654)..(654): Xaa can be any naturally occurring amino acid except Pro or Gly
  SITE (655)..(655): Xaa can be any naturally occurring amino acid except Pro or Gly
  SITE (657)..(657): Xaa can be any naturally occurring amino acid
  SITE (658)..(658): Xaa can be any naturally occurring amino acid
  SITE (659)..(659): Xaa can be any naturally occurring amino acid
  SITE (661)..(661): Xaa can be any naturally occurring amino acid except Pro or Gly
  SITE (662)..(662): Xaa can be any naturally occurring amino acid except Pro or Gly
  SITE (663)..(663): Xaa can be any naturally occurring amino acid except Pro or Gly
  SITE (664)..(664): Xaa can be any naturally occurring amino acid except Pro or Gly
  SITE (666)..(666): Xaa can be any naturally occurring amino acid
  SITE (667)..(667): Xaa can be any naturally occurring amino acid
  SITE (668)..(668): Xaa can be any naturally occurring amino acid
  SITE (670)..(670): Xaa can be any naturally occurring amino acid except Pro or Gly
  SITE (671)..(671): Xaa can be any naturally occurring amino acid except Pro or Gly
  SITE (672)..(672): Xaa can be any naturally occurring amino acid except Pro or Gly
  SITE (673)..(673): Xaa can be any naturally occurring amino acid except Pro or Gly
  SITE (675)..(675): Xaa can be any naturally occurring amino acid
  SITE (676)..(676): Xaa can be any naturally occurring amino acid
  SITE (677)..(677): Xaa can be any naturally occurring amino acid
  SITE (679)..(679): Xaa can be any naturally occurring amino acid except Pro or Gly
  SITE (680)..(680): Xaa can be any naturally occurring amino acid except Pro or Gly
  SITE (681)..(681): Xaa can be any naturally occurring amino acid except Pro or Gly
  SITE (682)..(682): Xaa can be any naturally occurring amino acid except Pro or Gly
  SITE (684)..(684): Xaa can be any naturally occurring amino acid
  SITE (685)..(685): Xaa can be any naturally occurring amino acid
  SITE (686)..(686): Xaa can be any naturally occurring amino acid
  SITE (688)..(688): Xaa can be any naturally occurring amino acid except Pro or Gly
  SITE (689)..(689): Xaa can be any naturally occurring amino acid except Pro or Gly
  SITE (690)..(690): Xaa can be any naturally occurring amino acid except Pro or Gly
  SITE (691)..(691): Xaa can be any naturally occurring amino acid except Pro or Gly
  SITE (693)..(693): Xaa can be any naturally occurring amino acid
  SITE (694)..(694): Xaa can be any naturally occurring amino acid
  SITE (695)..(695): Xaa can be any naturally occurring amino acid
  SITE (697)..(697): Xaa can be any naturally occurring amino acid except Pro or Gly
  SITE (698)..(698): Xaa can be any naturally occurring amino acid except Pro or Gly
  SITE (699)..(699): Xaa can be any naturally occurring amino acid except Pro or Gly
  SITE (700)..(700): Xaa can be any naturally occurring amino acid except Pro or Gly
  SITE (702)..(702): Xaa can be any naturally occurring amino acid
  SITE (703)..(703): Xaa can be any naturally occurring amino acid
  SITE (704)..(704): Xaa can be any naturally occurring amino acid
  SITE (706)..(706): Xaa can be any naturally occurring amino acid except Pro or Gly
  SITE (707)..(707): Xaa can be any naturally occurring amino acid except Pro or Gly
  SITE (708)..(708): Xaa can be any naturally occurring amino acid except Pro or Gly
  SITE (709)..(709): Xaa can be any naturally occurring amino acid except Pro or Gly
  SITE (711)..(711): Xaa can be any naturally occurring amino acid
  SITE (712)..(712): Xaa can be any naturally occurring amino acid
  SITE (713)..(713): Xaa can be any naturally occurring amino acid
  SITE (715)..(715): Xaa can be any naturally occurring amino acid except Pro or Gly
  SITE (716)..(716): Xaa can be any naturally occurring amino acid except Pro or Gly
  SITE (717)..(717): Xaa can be any naturally occurring amino acid except Pro or Gly
  SITE (718)..(718): Xaa can be any naturally occurring amino acid except Pro or Gly
  SITE (720)..(720): Xaa can be any naturally occurring amino acid
  SITE (721)..(721): Xaa can be any naturally occurring amino acid
  SITE (722)..(722): Xaa can be any naturally occurring amino acid
  SITE (724)..(724): Xaa can be any naturally occurring amino acid except Pro or Gly
  SITE (725)..(725): Xaa can be any naturally occurring amino acid except Pro or Gly
  SITE (726)..(726): Xaa can be any naturally occurring amino acid except Pro or Gly
  SITE (727)..(727): Xaa can be any naturally occurring amino acid except Pro or Gly
  SITE (729)..(729): Xaa can be any naturally occurring amino acid
  SITE (730)..(730): Xaa can be any naturally occurring amino acid
  SITE (731)..(731): Xaa can be any naturally occurring amino acid
  SITE (733)..(733): Xaa can be any naturally occurring amino acid except Pro or Gly
  SITE (734)..(734): Xaa can be any naturally occurring amino acid except Pro or Gly
  SITE (735)..(735): Xaa can be any naturally occurring amino acid except Pro or Gly
  SITE (736)..(736): Xaa can be any naturally occurring amino acid except Pro or Gly
  SITE (738)..(738): Xaa can be any naturally occurring amino acid
  SITE (739)..(739): Xaa can be any naturally occurring amino acid
  SITE (740)..(740): Xaa can be any naturally occurring amino acid
  SITE (742)..(742): Xaa can be any naturally occurring amino acid except Pro or Gly
  SITE (743)..(743): Xaa can be any naturally occurring amino acid except Pro or Gly
  SITE (744)..(744): Xaa can be any naturally occurring amino acid except Pro or Gly
  SITE (745)..(745): Xaa can be any naturally occurring amino acid except Pro or Gly
  SITE (747)..(747): Xaa can be any naturally occurring amino acid
  SITE (748)..(748): Xaa can be any naturally occurring amino acid
  SITE (749)..(749): Xaa can be any naturally occurring amino acid
  SITE (751)..(751): Xaa can be any naturally occurring amino acid except Pro or Gly
  SITE (752)..(752): Xaa can be any naturally occurring amino acid except Pro or Gly
  SITE (753)..(753): Xaa can be any naturally occurring amino acid except Pro or Gly
  SITE (754)..(754): Xaa can be any naturally occurring amino acid except Pro or Gly
  SITE (756)..(756): Xaa can be any naturally occurring amino acid
  SITE (757)..(757): Xaa can be any naturally occurring amino acid
  SITE (758)..(758): Xaa can be any naturally occurring amino acid
  SITE (760)..(760): Xaa can be any naturally occurring amino acid except Pro or Gly
  SITE (761)..(761): Xaa can be any naturally occurring amino acid except Pro or Gly
  SITE (762)..(762): Xaa can be any naturally occurring amino acid except Pro or Gly
  SITE (763)..(763): Xaa can be any naturally occurring amino acid except Pro or Gly
  SITE (765)..(765): Xaa can be any naturally occurring amino acid
  SITE (766)..(766): Xaa can be any naturally occurring amino acid
  SITE (767)..(767): Xaa can be any naturally occurring amino acid
  SITE (769)..(769): Xaa can be any naturally occurring amino acid except Pro or Gly
  SITE (770)..(770): Xaa can be any naturally occurring amino acid except Pro or Gly
  SITE (771)..(771): Xaa can be any naturally occurring amino acid except Pro or Gly
  SITE (772)..(772): Xaa can be any naturally occurring amino acid except Pro or Gly
  SITE (774)..(774): Xaa can be any naturally occurring amino acid
  SITE (775)..(775): Xaa can be any naturally occurring amino acid
  SITE (776)..(776): Xaa can be any naturally occurring amino acid
  SITE (778)..(778): Xaa can be any naturally occurring amino acid except Pro or Gly
  SITE (779)..(779): Xaa can be any naturally occurring amino acid except Pro or Gly
  SITE (780)..(780): Xaa can be any naturally occurring amino acid except Pro or Gly
  SITE (781)..(781): Xaa can be any naturally occurring amino acid except Pro or Gly
  SITE (783)..(783): Xaa can be any naturally occurring amino acid
  SITE (784)..(784): Xaa can be any naturally occurring amino acid
  SITE (785)..(785): Xaa can be any naturally occurring amino acid
  SITE (787)..(787): Xaa can be any naturally occurring amino acid except Pro or Gly
  SITE (788)..(788): Xaa can be any naturally occurring amino acid except Pro or Gly
  SITE (789)..(789): Xaa can be any naturally occurring amino acid except Pro or Gly
  SITE (790)..(790): Xaa can be any naturally occurring amino acid except Pro or Gly
  SITE (792)..(792): Xaa can be any naturally occurring amino acid
  SITE (793)..(793): Xaa can be any naturally occurring amino acid
  SITE (794)..(794): Xaa can be any naturally occurring amino acid
  SITE (796)..(796): Xaa can be any naturally occurring amino acid except Pro or Gly
  SITE (797)..(797): Xaa can be any naturally occurring amino acid except Pro or Gly
  SITE (798)..(798): Xaa can be any naturally occurring amino acid except Pro or Gly
  SITE (799)..(799): Xaa can be any naturally occurring amino acid except Pro or Gly
  SITE (801)..(801): Xaa can be any naturally occurring amino acid
  SITE (802)..(802): Xaa can be any naturally occurring amino acid
  SITE (803)..(803): Xaa can be any naturally occurring amino acid
  SITE (805)..(805): Xaa can be any naturally occurring amino acid except Pro or Gly
  SITE (806)..(806): Xaa can be any naturally occurring amino acid except Pro or Gly
  SITE (807)..(807): Xaa can be any naturally occurring amino acid except Pro or Gly
  SITE (808)..(808): Xaa can be any naturally occurring amino acid except Pro or Gly
  SITE (810)..(810): Xaa can be any naturally occurring amino acid
  SITE (811)..(811): Xaa can be any naturally occurring amino acid
  SITE (812)..(812): Xaa can be any naturally occurring amino acid
  SITE (814)..(814): Xaa can be any naturally occurring amino acid except Pro or Gly
  SITE (815)..(815): Xaa can be any naturally occurring amino acid except Pro or Gly
  SITE (816)..(816): Xaa can be any naturally occurring amino acid except Pro or Gly
  SITE (817)..(817): Xaa can be any naturally occurring amino acid except Pro or Gly
  SITE (819)..(819): Xaa can be any naturally occurring amino acid
  SITE (820)..(820): Xaa can be any naturally occurring amino acid
  SITE (821)..(821): Xaa can be any naturally occurring amino acid
  SITE (823)..(823): Xaa can be any naturally occurring amino acid except Pro or Gly
  SITE (824)..(824): Xaa can be any naturally occurring amino acid except Pro or Gly
  SITE (825)..(825): Xaa can be any naturally occurring amino acid except Pro or Gly
  SITE (826)..(826): Xaa can be any naturally occurring amino acid except Pro or Gly
  SITE (828)..(828): Xaa can be any naturally occurring amino acid
  SITE (829)..(829): Xaa can be any naturally occurring amino acid
  SITE (830)..(830): Xaa can be any naturally occurring amino acid
  SITE (832)..(832): Xaa can be any naturally occurring amino acid except Pro or Gly
  SITE (833)..(833): Xaa can be any naturally occurring amino acid except Pro or Gly
  SITE (834)..(834): Xaa can be any naturally occurring amino acid except Pro or Gly
  SITE (835)..(835): Xaa can be any naturally occurring amino acid except Pro or Gly
  SITE (837)..(837): Xaa can be any naturally occurring amino acid
  SITE (838)..(838): Xaa can be any naturally occurring amino acid
  SITE (839)..(839): Xaa can be any naturally occurring amino acid
  SITE (841)..(841): Xaa can be any naturally occurring amino acid except Pro or Gly
  SITE (842)..(842): Xaa can be any naturally occurring amino acid except Pro or Gly
  SITE (843)..(843): Xaa can be any naturally occurring amino acid except Pro or Gly
  SITE (844)..(844): Xaa can be any naturally occurring amino acid except Pro or Gly
  SITE (846)..(846): Xaa can be any naturally occurring amino acid
  SITE (847)..(847): Xaa can be any naturally occurring amino acid
  SITE (848)..(848): Xaa can be any naturally occurring amino acid
  SITE (850)..(850): Xaa can be any naturally occurring amino acid except Pro or Gly
  SITE (851)..(851): Xaa can be any naturally occurring amino acid except Pro or Gly
  SITE (852)..(852): Xaa can be any naturally occurring amino acid except Pro or Gly
  SITE (853)..(853): Xaa can be any naturally occurring amino acid except Pro or Gly
  SITE (855)..(855): Xaa can be any naturally occurring amino acid
  SITE (856)..(856): Xaa can be any naturally occurring amino acid
  SITE (857)..(857): Xaa can be any naturally occurring amino acid
  SITE (859)..(859): Xaa can be any naturally occurring amino acid except Pro or Gly
  SITE (860)..(860): Xaa can be any naturally occurring amino acid except Pro or Gly
  SITE (861)..(861): Xaa can be any naturally occurring amino acid except Pro or Gly
  SITE (862)..(862): Xaa can be any naturally occurring amino acid except Pro or Gly
  SITE (864)..(864): Xaa can be any naturally occurring amino acid
  SITE (865)..(865): Xaa can be any naturally occurring amino acid
  SITE (866)..(866): Xaa can be any naturally occurring amino acid
  SITE (868)..(868): Xaa can be any naturally occurring amino acid except Pro or Gly
  SITE (869)..(869): Xaa can be any naturally occurring amino acid except Pro or Gly
  SITE (870)..(870): Xaa can be any naturally occurring amino acid except Pro or Gly
  SITE (871)..(871): Xaa can be any naturally occurring amino acid except Pro or Gly
  SITE (873)..(873): Xaa can be any naturally occurring amino acid
  SITE (874)..(874): Xaa can be any naturally occurring amino acid
  SITE (875)..(875): Xaa can be any naturally occurring amino acid
  SITE (877)..(877): Xaa can be any naturally occurring amino acid except Pro or Gly
  SITE (878)..(878): Xaa can be any naturally occurring amino acid except Pro or Gly
  SITE (879)..(879): Xaa can be any naturally occurring amino acid except Pro or Gly
  SITE (880)..(880): Xaa can be any naturally occurring amino acid except Pro or Gly
  SITE (882)..(882): Xaa can be any naturally occurring amino acid
  SITE (883)..(883): Xaa can be any naturally occurring amino acid
  SITE (884)..(884): Xaa can be any naturally occurring amino acid
  SITE (886)..(886): Xaa can be any naturally occurring amino acid except Pro or Gly
  SITE (887)..(887): Xaa can be any naturally occurring amino acid except Pro or Gly
  SITE (888)..(888): Xaa can be any naturally occurring amino acid except Pro or Gly
  SITE (889)..(889): Xaa can be any naturally occurring amino acid except Pro or Gly
  SITE (891)..(891): Xaa can be any naturally occurring amino acid
  SITE (892)..(892): Xaa can be any naturally occurring amino acid
  SITE (893)..(893): Xaa can be any naturally occurring amino acid
  SITE (895)..(895): Xaa can be any naturally occurring amino acid except Pro or Gly
  SITE (896)..(896): Xaa can be any naturally occurring amino acid except Pro or Gly
  SITE (897)..(897): Xaa can be any naturally occurring amino acid except Pro or Gly
  SITE (898)..(898): Xaa can be any naturally occurring amino acid except Pro or Gly
  SITE (900)..(900): Xaa can be any naturally occurring amino acid
  SITE (901)..(901): Xaa can be any naturally occurring amino acid
  SITE (902)..(902): Xaa can be any naturally occurring amino acid
  SITE (904)..(904): Xaa can be any naturally occurring amino acid except Pro or Gly
  SITE (905)..(905): Xaa can be any naturally occurring amino acid except Pro or Gly
  SITE (906)..(906): Xaa can be any naturally occurring amino acid except Pro or Gly
  SITE (907)..(907): Xaa can be any naturally occurring amino acid except Pro or Gly
  SITE (909)..(909): Xaa can be any naturally occurring amino acid
  SITE (910)..(910): Xaa can be any naturally occurring amino acid
  SITE (911)..(911): Xaa can be any naturally occurring amino acid
  SITE (913)..(913): Xaa can be any naturally occurring amino acid except Pro or Gly
  SITE (914)..(914): Xaa can be any naturally occurring amino acid except Pro or Gly
  SITE (915)..(915): Xaa can be any naturally occurring amino acid except Pro or Gly
  SITE (916)..(916): Xaa can be any naturally occurring amino acid except Pro or Gly
  SITE (918)..(918): Xaa can be any naturally occurring amino acid
  SITE (919)..(919): Xaa can be any naturally occurring amino acid
  SITE (920)..(920): Xaa can be any naturally occurring amino acid
  SITE (922)..(922): Xaa can be any naturally occurring amino acid except Pro or Gly
  SITE (923)..(923): Xaa can be any naturally occurring amino acid except Pro or Gly
  SITE (924)..(924): Xaa can be any naturally occurring amino acid except Pro or Gly
  SITE (925)..(925): Xaa can be any naturally occurring amino acid except Pro or Gly
  SITE (927)..(927): Xaa can be any naturally occurring amino acid
  SITE (928)..(928): Xaa can be any naturally occurring amino acid
  SITE (929)..(929): Xaa can be any naturally occurring amino acid
  SITE (931)..(931): Xaa can be any naturally occurring amino acid except Pro or Gly
  SITE (932)..(932): Xaa can be any naturally occurring amino acid except Pro or Gly
  SITE (933)..(933): Xaa can be any naturally occurring amino acid except Pro or Gly
  SITE (934)..(934): Xaa can be any naturally occurring amino acid except Pro or Gly
  SITE (936)..(936): Xaa can be any naturally occurring amino acid
  SITE (937)..(937): Xaa can be any naturally occurring amino acid
  SITE (938)..(938): Xaa can be any naturally occurring amino acid
  SITE (940)..(940): Xaa can be any naturally occurring amino acid except Pro or Gly
  SITE (941)..(941): Xaa can be any naturally occurring amino acid except Pro or Gly
  SITE (942)..(942): Xaa can be any naturally occurring amino acid except Pro or Gly
  SITE (943)..(943): Xaa can be any naturally occurring amino acid except Pro or Gly
  SITE (945)..(945): Xaa can be any naturally occurring amino acid
  SITE (946)..(946): Xaa can be any naturally occurring amino acid
  SITE (947)..(947): Xaa can be any naturally occurring amino acid
  SITE (949)..(949): Xaa can be any naturally occurring amino acid except Pro or Gly
  SITE (950)..(950): Xaa can be any naturally occurring amino acid except Pro or Gly
  SITE (951)..(951): Xaa can be any naturally occurring amino acid except Pro or Gly
  SITE (952)..(952): Xaa can be any naturally occurring amino acid except Pro or Gly
  SITE (954)..(954): Xaa can be any naturally occurring amino acid
  SITE (955)..(955): Xaa can be any naturally occurring amino acid
  SITE (956)..(956): Xaa can be any naturally occurring amino acid
  SITE (958)..(958): Xaa can be any naturally occurring amino acid except Pro or Gly
  SITE (959)..(959): Xaa can be any naturally occurring amino acid except Pro or Gly
  SITE (960)..(960): Xaa can be any naturally occurring amino acid except Pro or Gly
  SITE (961)..(961): Xaa can be any naturally occurring amino acid except Pro or Gly
  SITE (963)..(963): Xaa can be any naturally occurring amino acid
  SITE (964)..(964): Xaa can be any naturally occurring amino acid
  SITE (965)..(965): Xaa can be any naturally occurring amino acid
  SITE (967)..(967): Xaa can be any naturally occurring amino acid except Pro or Gly
  SITE (968)..(968): Xaa can be any naturally occurring amino acid except Pro or Gly
  SITE (969)..(969): Xaa can be any naturally occurring amino acid except Pro or Gly
  SITE (970)..(970): Xaa can be any naturally occurring amino acid except Pro or Gly
  SITE (972)..(972): Xaa can be any naturally occurring amino acid
  SITE (973)..(973): Xaa can be any naturally occurring amino acid
  SITE (974)..(974): Xaa can be any naturally occurring amino acid
  SITE (976)..(976): Xaa can be any naturally occurring amino acid except Pro or Gly
  SITE (977)..(977): Xaa can be any naturally occurring amino acid except Pro or Gly
  SITE (978)..(978): Xaa can be any naturally occurring amino acid except Pro or Gly
  SITE (979)..(979): Xaa can be any naturally occurring amino acid except Pro or Gly
  SITE (981)..(981): Xaa can be any naturally occurring amino acid
  SITE (982)..(982): Xaa can be any naturally occurring amino acid
  SITE (983)..(983): Xaa can be any naturally occurring amino acid
  SITE (985)..(985): Xaa can be any naturally occurring amino acid except Pro or Gly
  SITE (986)..(986): Xaa can be any naturally occurring amino acid except Pro or Gly
  SITE (987)..(987): Xaa can be any naturally occurring amino acid except Pro or Gly
  SITE (988)..(988): Xaa can be any naturally occurring amino acid except Pro or Gly
  SITE (990)..(990): Xaa can be any naturally occurring amino acid
  SITE (991)..(991): Xaa can be any naturally occurring amino acid
  SITE (992)..(992): Xaa can be any naturally occurring amino acid
  SITE (994)..(994): Xaa can be any naturally occurring amino acid except Pro or Gly
  SITE (995)..(995): Xaa can be any naturally occurring amino acid except Pro or Gly
  SITE (996)..(996): Xaa can be any naturally occurring amino acid except Pro or Gly
  SITE (997)..(997): Xaa can be any naturally occurring amino acid except Pro or Gly
  SITE (999)..(999): Xaa can be any naturally occurring amino acid
  SITE (1000)..(1000): Xaa can be any naturally occurring amino acid
  SITE (1001)..(1001): Xaa can be any naturally occurring amino acid
  SITE (1003)..(1003): Xaa can be any naturally occurring amino acid except Pro or Gly
  SITE (1004)..(1004): Xaa can be any naturally occurring amino acid except Pro or Gly
  SITE (1005)..(1005): Xaa can be any naturally occurring amino acid except Pro or Gly
  SITE (1006)..(1006): Xaa can be any naturally occurring amino acid except Pro or Gly
  SITE (1008)..(1008): Xaa can be any naturally occurring amino acid
  SITE (1009)..(1009): Xaa can be any naturally occurring amino acid
  SITE (1010)..(1010): Xaa can be any naturally occurring amino acid
  SITE (1012)..(1012): Xaa can be any naturally occurring amino acid except Pro or Gly
  SITE (1013)..(1013): Xaa can be any naturally occurring amino acid except Pro or Gly
  SITE (1014)..(1014): Xaa can be any naturally occurring amino acid except Pro or Gly
  SITE (1015)..(1015): Xaa can be any naturally occurring amino acid except Pro or Gly
  SITE (1017)..(1017): Xaa can be any naturally occurring amino acid
  SITE (1018)..(1018): Xaa can be any naturally occurring amino acid
  SITE (1019)..(1019): Xaa can be any naturally occurring amino acid
  SITE (1021)..(1021): Xaa can be any naturally occurring amino acid except Pro or Gly
  SITE (1022)..(1022): Xaa can be any naturally occurring amino acid except Pro or Gly
  SITE (1023)..(1023): Xaa can be any naturally occurring amino acid except Pro or Gly
  SITE (1024)..(1024): Xaa can be any naturally occurring amino acid except Pro or Gly
  SITE (1026)..(1026): Xaa can be any naturally occurring amino acid
  SITE (1027)..(1027): Xaa can be any naturally occurring amino acid
  SITE (1028)..(1028): Xaa can be any naturally occurring amino acid
  SITE (1030)..(1030): Xaa can be any naturally occurring amino acid except Pro or Gly
  SITE (1031)..(1031): Xaa can be any naturally occurring amino acid except Pro or Gly
  SITE (1032)..(1032): Xaa can be any naturally occurring amino acid except Pro or Gly
  SITE (1033)..(1033): Xaa can be any naturally occurring amino acid except Pro or Gly
  SITE (1035)..(1035): Xaa can be any naturally occurring amino acid
  SITE (1036)..(1036): Xaa can be any naturally occurring amino acid
  SITE (1037)..(1037): Xaa can be any naturally occurring amino acid
  SITE (1039)..(1039): Xaa can be any naturally occurring amino acid except Pro or Gly
  SITE (1040)..(1040): Xaa can be any naturally occurring amino acid except Pro or Gly
  SITE (1041)..(1041): Xaa can be any naturally occurring amino acid except Pro or Gly
  SITE (1042)..(1042): Xaa can be any naturally occurring amino acid except Pro or Gly
  SITE (1044)..(1044): Xaa can be any naturally occurring amino acid
  SITE (1045)..(1045): Xaa can be any naturally occurring amino acid
  SITE (1046)..(1046): Xaa can be any naturally occurring amino acid
  SITE (1048)..(1048): Xaa can be any naturally occurring amino acid except Pro or Gly
  SITE (1049)..(1049): Xaa can be any naturally occurring amino acid except Pro or Gly
  SITE (1050)..(1050): Xaa can be any naturally occurring amino acid except Pro or Gly
  SITE (1051)..(1051): Xaa can be any naturally occurring amino acid except Pro or Gly
  SITE (1053)..(1053): Xaa can be any naturally occurring amino acid
  SITE (1054)..(1054): Xaa can be any naturally occurring amino acid
  SITE (1055)..(1055): Xaa can be any naturally occurring amino acid
  SITE (1057)..(1057): Xaa can be any naturally occurring amino acid except Pro or Gly
  SITE (1058)..(1058): Xaa can be any naturally occurring amino acid except Pro or Gly
  SITE (1059)..(1059): Xaa can be any naturally occurring amino acid except Pro or Gly
  SITE (1060)..(1060): Xaa can be any naturally occurring amino acid except Pro or Gly
  SITE (1062)..(1062): Xaa can be any naturally occurring amino acid
  SITE (1063)..(1063): Xaa can be any naturally occurring amino acid
  SITE (1064)..(1064): Xaa can be any naturally occurring amino acid
  SITE (1066)..(1066): Xaa can be any naturally occurring amino acid except Pro or Gly
  SITE (1067)..(1067): Xaa can be any naturally occurring amino acid except Pro or Gly
  SITE (1068)..(1068): Xaa can be any naturally occurring amino acid except Pro or Gly
  SITE (1069)..(1069): Xaa can be any naturally occurring amino acid except Pro or Gly
  SITE (1071)..(1071): Xaa can be any naturally occurring amino acid
  SITE (1072)..(1072): Xaa can be any naturally occurring amino acid
  SITE (1073)..(1073): Xaa can be any naturally occurring amino acid
  SITE (1075)..(1075): Xaa can be any naturally occurring amino acid except Pro or Gly
  SITE (1076)..(1076): Xaa can be any naturally occurring amino acid except Pro or Gly
  SITE (1077)..(1077): Xaa can be any naturally occurring amino acid except Pro or Gly
  SITE (1078)..(1078): Xaa can be any naturally occurring amino acid except Pro or Gly
  SITE (1080)..(1080): Xaa can be any naturally occurring amino acid
  SITE (1081)..(1081): Xaa can be any naturally occurring amino acid
  SITE (1082)..(1082): Xaa can be any naturally occurring amino acid
  SITE (1084)..(1084): Xaa can be any naturally occurring amino acid except Pro or Gly
  SITE (1085)..(1085): Xaa can be any naturally occurring amino acid except Pro or Gly
  SITE (1086)..(1086): Xaa can be any naturally occurring amino acid except Pro or Gly
  SITE (1087)..(1087): Xaa can be any naturally occurring amino acid except Pro or Gly
  SITE (1089)..(1089): Xaa can be any naturally occurring amino acid
  SITE (1090)..(1090): Xaa can be any naturally occurring amino acid
  SITE (1091)..(1091): Xaa can be any naturally occurring amino acid
  SITE (1093)..(1093): Xaa can be any naturally occurring amino acid except Pro or Gly
  SITE (1094)..(1094): Xaa can be any naturally occurring amino acid except Pro or Gly
  SITE (1095)..(1095): Xaa can be any naturally occurring amino acid except Pro or Gly
  SITE (1096)..(1096): Xaa can be any naturally occurring amino acid except Pro or Gly
  SITE (1098)..(1098): Xaa can be any naturally occurring amino acid
  SITE (1099)..(1099): Xaa can be any naturally occurring amino acid
  SITE (1100)..(1100): Xaa can be any naturally occurring amino acid
  SITE (1102)..(1102): Xaa can be any naturally occurring amino acid except Pro or Gly
  SITE (1103)..(1103): Xaa can be any naturally occurring amino acid except Pro or Gly
  SITE (1104)..(1104): Xaa can be any naturally occurring amino acid except Pro or Gly
  SITE (1105)..(1105): Xaa can be any naturally occurring amino acid except Pro or Gly
  SITE (1107)..(1107): Xaa can be any naturally occurring amino acid
  SITE (1108)..(1108): Xaa can be any naturally occurring amino acid
  SITE (1109)..(1109): Xaa can be any naturally occurring amino acid
  SITE (1111)..(1111): Xaa can be any naturally occurring amino acid except Pro or Gly
  SITE (1112)..(1112): Xaa can be any naturally occurring amino acid except Pro or Gly
  SITE (1113)..(1113): Xaa can be any naturally occurring amino acid except Pro or Gly
  SITE (1114)..(1114): Xaa can be any naturally occurring amino acid except Pro or Gly
  SITE (1116)..(1116): Xaa can be any naturally occurring amino acid
  SITE (1117)..(1117): Xaa can be any naturally occurring amino acid
  SITE (1118)..(1118): Xaa can be any naturally occurring amino acid
  SITE (1120)..(1120): Xaa can be any naturally occurring amino acid except Pro or Gly
  SITE (1121)..(1121): Xaa can be any naturally occurring amino acid except Pro or Gly
  SITE (1122)..(1122): Xaa can be any naturally occurring amino acid except Pro or Gly
  SITE (1123)..(1123): Xaa can be any naturally occurring amino acid except Pro or Gly
  SITE (1125)..(1125): Xaa can be any naturally occurring amino acid
  SITE (1126)..(1126): Xaa can be any naturally occurring amino acid
  SITE (1127)..(1127): Xaa can be any naturally occurring amino acid
  SITE (1129)..(1129): Xaa can be any naturally occurring amino acid except Pro or Gly
  SITE (1130)..(1130): Xaa can be any naturally occurring amino acid except Pro or Gly
  SITE (1131)..(1131): Xaa can be any naturally occurring amino acid except Pro or Gly
  SITE (1132)..(1132): Xaa can be any naturally occurring amino acid except Pro or Gly
  SITE (1134)..(1134): Xaa can be any naturally occurring amino acid
  SITE (1135)..(1135): Xaa can be any naturally occurring amino acid
  SITE (1136)..(1136): Xaa can be any naturally occurring amino acid
  SITE (1138)..(1138): Xaa can be any naturally occurring amino acid except Pro or Gly
  SITE (1139)..(1139): Xaa can be any naturally occurring amino acid except Pro or Gly
  SITE (1140)..(1140): Xaa can be any naturally occurring amino acid except Pro or Gly
  SITE (1141)..(1141): Xaa can be any naturally occurring amino acid except Pro or Gly
  SITE (1143)..(1143): Xaa can be any naturally occurring amino acid
  SITE (1144)..(1144): Xaa can be any naturally occurring amino acid
  SITE (1145)..(1145): Xaa can be any naturally occurring amino acid
  SITE (1147)..(1147): Xaa can be any naturally occurring amino acid except Pro or Gly
  SITE (1148)..(1148): Xaa can be any naturally occurring amino acid except Pro or Gly
  SITE (1149)..(1149): Xaa can be any naturally occurring amino acid except Pro or Gly
  SITE (1150)..(1150): Xaa can be any naturally occurring amino acid except Pro or Gly
  SITE (1152)..(1152): Xaa can be any naturally occurring amino acid
  SITE (1153)..(1153): Xaa can be any naturally occurring amino acid
  SITE (1154)..(1154): Xaa can be any naturally occurring amino acid
  SITE (1156)..(1156): Xaa can be any naturally occurring amino acid except Pro or Gly
  SITE (1157)..(1157): Xaa can be any naturally occurring amino acid except Pro or Gly
  SITE (1158)..(1158): Xaa can be any naturally occurring amino acid except Pro or Gly
  SITE (1159)..(1159): Xaa can be any naturally occurring amino acid except Pro or Gly
  SITE (1161)..(1161): Xaa can be any naturally occurring amino acid
  SITE (1162)..(1162): Xaa can be any naturally occurring amino acid
  SITE (1163)..(1163): Xaa can be any naturally occurring amino acid
  SITE (1165)..(1165): Xaa can be any naturally occurring amino acid except Pro or Gly
  SITE (1166)..(1166): Xaa can be any naturally occurring amino acid except Pro or Gly
  SITE (1167)..(1167): Xaa can be any naturally occurring amino acid except Pro or Gly
  SITE (1168)..(1168): Xaa can be any naturally occurring amino acid except Pro or Gly
  SITE (1170)..(1170): Xaa can be any naturally occurring amino acid
  SITE (1171)..(1171): Xaa can be any naturally occurring amino acid
  SITE (1172)..(1172): Xaa can be any naturally occurring amino acid
  SITE (1174)..(1174): Xaa can be any naturally occurring amino acid except Pro or Gly
  SITE (1175)..(1175): Xaa can be any naturally occurring amino acid except Pro or Gly
  SITE (1176)..(1176): Xaa can be any naturally occurring amino acid except Pro or Gly
  SITE (1177)..(1177): Xaa can be any naturally occurring amino acid except Pro or Gly
  SITE (1179)..(1179): Xaa can be any naturally occurring amino acid
  SITE (1180)..(1180): Xaa can be any naturally occurring amino acid
  SITE (1181)..(1181): Xaa can be any naturally occurring amino acid
  SITE (1183)..(1183): Xaa can be any naturally occurring amino acid except Pro or Gly
  SITE (1184)..(1184): Xaa can be any naturally occurring amino acid except Pro or Gly
  SITE (1185)..(1185): Xaa can be any naturally occurring amino acid except Pro or Gly
  SITE (1186)..(1186): Xaa can be any naturally occurring amino acid except Pro or Gly
  SITE (1188)..(1188): Xaa can be any naturally occurring amino acid
  SITE (1189)..(1189): Xaa can be any naturally occurring amino acid
  SITE (1190)..(1190): Xaa can be any naturally occurring amino acid
  SITE (1192)..(1192): Xaa can be any naturally occurring amino acid except Pro or Gly
  SITE (1193)..(1193): Xaa can be any naturally occurring amino acid except Pro or Gly
  SITE (1194)..(1194): Xaa can be any naturally occurring amino acid except Pro or Gly
  SITE (1195)..(1195): Xaa can be any naturally occurring amino acid except Pro or Gly
  SITE (1197)..(1197): Xaa can be any naturally occurring amino acid
  SITE (1198)..(1198): Xaa can be any naturally occurring amino acid
  SITE (1199)..(1199): Xaa can be any naturally occurring amino acid
  SITE (1201)..(1201): Xaa can be any naturally occurring amino acid except Pro or Gly
  SITE (1202)..(1202): Xaa can be any naturally occurring amino acid except Pro or Gly
  SITE (1203)..(1203): Xaa can be any naturally occurring amino acid except Pro or Gly
  SITE (1204)..(1204): Xaa can be any naturally occurring amino acid except Pro or Gly
  SITE (1206)..(1206): Xaa can be any naturally occurring amino acid
  SITE (1207)..(1207): Xaa can be any naturally occurring amino acid
  SITE (1208)..(1208): Xaa can be any naturally occurring amino acid
  SITE (1210)..(1210): Xaa can be any naturally occurring amino acid except Pro or Gly
  SITE (1211)..(1211): Xaa can be any naturally occurring amino acid except Pro or Gly
  SITE (1212)..(1212): Xaa can be any naturally occurring amino acid except Pro or Gly
  SITE (1213)..(1213): Xaa can be any naturally occurring amino acid except Pro or Gly
  SITE (1215)..(1215): Xaa can be any naturally occurring amino acid
  SITE (1216)..(1216): Xaa can be any naturally occurring amino acid
  SITE (1217)..(1217): Xaa can be any naturally occurring amino acid
  SITE (1219)..(1219): Xaa can be any naturally occurring amino acid except Pro or Gly
  SITE (1220)..(1220): Xaa can be any naturally occurring amino acid except Pro or Gly
  SITE (1221)..(1221): Xaa can be any naturally occurring amino acid except Pro or Gly
  SITE (1222)..(1222): Xaa can be any naturally occurring amino acid except Pro or Gly
  SITE (1224)..(1224): Xaa can be any naturally occurring amino acid
  SITE (1225)..(1225): Xaa can be any naturally occurring amino acid
  SITE (1226)..(1226): Xaa can be any naturally occurring amino acid
  SITE (1228)..(1228): Xaa can be any naturally occurring amino acid except Pro or Gly
  SITE (1229)..(1229): Xaa can be any naturally occurring amino acid except Pro or Gly
  SITE (1230)..(1230): Xaa can be any naturally occurring amino acid except Pro or Gly
  SITE (1231)..(1231): Xaa can be any naturally occurring amino acid except Pro or Gly
  SITE (1233)..(1233): Xaa can be any naturally occurring amino acid
  SITE (1234)..(1234): Xaa can be any naturally occurring amino acid
  SITE (1235)..(1235): Xaa can be any naturally occurring amino acid
  SITE (1237)..(1237): Xaa can be any naturally occurring amino acid except Pro or Gly
  SITE (1238)..(1238): Xaa can be any naturally occurring amino acid except Pro or Gly
  SITE (1239)..(1239): Xaa can be any naturally occurring amino acid except Pro or Gly
  SITE (1240)..(1240): Xaa can be any naturally occurring amino acid except Pro or Gly
  SITE (1242)..(1242): Xaa can be any naturally occurring amino acid
  SITE (1243)..(1243): Xaa can be any naturally occurring amino acid
  SITE (1244)..(1244): Xaa can be any naturally occurring amino acid
  SITE (1246)..(1246): Xaa can be any naturally occurring amino acid except Pro or Gly
  SITE (1247)..(1247): Xaa can be any naturally occurring amino acid except Pro or Gly
  SITE (1248)..(1248): Xaa can be any naturally occurring amino acid except Pro or Gly
  SITE (1249)..(1249): Xaa can be any naturally occurring amino acid except Pro or Gly
  SITE (1251)..(1251): Xaa can be any naturally occurring amino acid
  SITE (1252)..(1252): Xaa can be any naturally occurring amino acid
  SITE (1253)..(1253): Xaa can be any naturally occurring amino acid
  SITE (1255)..(1255): Xaa can be any naturally occurring amino acid except Pro or Gly
  SITE (1256)..(1256): Xaa can be any naturally occurring amino acid except Pro or Gly
  SITE (1257)..(1257): Xaa can be any naturally occurring amino acid except Pro or Gly
  SITE (1258)..(1258): Xaa can be any naturally occurring amino acid except Pro or Gly
  SITE (1260)..(1260): Xaa can be any naturally occurring amino acid
  SITE (1261)..(1261): Xaa can be any naturally occurring amino acid
  SITE (1262)..(1262): Xaa can be any naturally occurring amino acid
  SITE (1264)..(1264): Xaa can be any naturally occurring amino acid except Pro or Gly
  SITE (1265)..(1265): Xaa can be any naturally occurring amino acid except Pro or Gly
  SITE (1266)..(1266): Xaa can be any naturally occurring amino acid except Pro or Gly
  SITE (1267)..(1267): Xaa can be any naturally occurring amino acid except Pro or Gly
  SITE (1269)..(1269): Xaa can be any naturally occurring amino acid
  SITE (1270)..(1270): Xaa can be any naturally occurring amino acid
  SITE (1271)..(1271): Xaa can be any naturally occurring amino acid
  SITE (1273)..(1273): Xaa can be any naturally occurring amino acid except Pro or Gly
  SITE (1274)..(1274): Xaa can be any naturally occurring amino acid except Pro or Gly
  SITE (1275)..(1275): Xaa can be any naturally occurring amino acid except Pro or Gly
  SITE (1276)..(1276): Xaa can be any naturally occurring amino acid except Pro or Gly
  SITE (1278)..(1278): Xaa can be any naturally occurring amino acid
  SITE (1279)..(1279): Xaa can be any naturally occurring amino acid
  SITE (1280)..(1280): Xaa can be any naturally occurring amino acid
  SITE (1282)..(1282): Xaa can be any naturally occurring amino acid except Pro or Gly
  SITE (1283)..(1283): Xaa can be any naturally occurring amino acid except Pro or Gly
  SITE (1284)..(1284): Xaa can be any naturally occurring amino acid except Pro or Gly
  SITE (1285)..(1285): Xaa can be any naturally occurring amino acid except Pro or Gly
  SITE (1287)..(1287): Xaa can be any naturally occurring amino acid
  SITE (1288)..(1288): Xaa can be any naturally occurring amino acid
  SITE (1289)..(1289): Xaa can be any naturally occurring amino acid
  SITE (1291)..(1291): Xaa can be any naturally occurring amino acid except Pro or Gly
  SITE (1292)..(1292): Xaa can be any naturally occurring amino acid except Pro or Gly
  SITE (1293)..(1293): Xaa can be any naturally occurring amino acid except Pro or Gly
  SITE (1294)..(1294): Xaa can be any naturally occurring amino acid except Pro or Gly
  SITE (1296)..(1296): Xaa can be any naturally occurring amino acid
  SITE (1297)..(1297): Xaa can be any naturally occurring amino acid
  SITE (1298)..(1298): Xaa can be any naturally occurring amino acid
  SITE (1300)..(1300): Xaa can be any naturally occurring amino acid except Pro or Gly
  SITE (1301)..(1301): Xaa can be any naturally occurring amino acid except Pro or Gly
  SITE (1302)..(1302): Xaa can be any naturally occurring amino acid except Pro or Gly
  SITE (1303)..(1303): Xaa can be any naturally occurring amino acid except Pro or Gly
  SITE (1305)..(1305): Xaa can be any naturally occurring amino acid
  SITE (1306)..(1306): Xaa can be any naturally occurring amino acid
  SITE (1307)..(1307): Xaa can be any naturally occurring amino acid
  SITE (1309)..(1309): Xaa can be any naturally occurring amino acid except Pro or Gly
  SITE (1310)..(1310): Xaa can be any naturally occurring amino acid except Pro or Gly
  SITE (1311)..(1311): Xaa can be any naturally occurring amino acid except Pro or Gly
  SITE (1312)..(1312): Xaa can be any naturally occurring amino acid except Pro or Gly
  SITE (1314)..(1314): Xaa can be any naturally occurring amino acid
  SITE (1315)..(1315): Xaa can be any naturally occurring amino acid
  SITE (1316)..(1316): Xaa can be any naturally occurring amino acid
  SITE (1318)..(1318): Xaa can be any naturally occurring amino acid except Pro or Gly
  SITE (1319)..(1319): Xaa can be any naturally occurring amino acid except Pro or Gly
  SITE (1320)..(1320): Xaa can be any naturally occurring amino acid except Pro or Gly
  SITE (1321)..(1321): Xaa can be any naturally occurring amino acid except Pro or Gly
  SITE (1323)..(1323): Xaa can be any naturally occurring amino acid
  SITE (1324)..(1324): Xaa can be any naturally occurring amino acid
  SITE (1325)..(1325): Xaa can be any naturally occurring amino acid
  SITE (1327)..(1327): Xaa can be any naturally occurring amino acid except Pro or Gly
  SITE (1328)..(1328): Xaa can be any naturally occurring amino acid except Pro or Gly
  SITE (1329)..(1329): Xaa can be any naturally occurring amino acid except Pro or Gly
  SITE (1330)..(1330): Xaa can be any naturally occurring amino acid except Pro or Gly
  SITE (1332)..(1332): Xaa can be any naturally occurring amino acid
  SITE (1333)..(1333): Xaa can be any naturally occurring amino acid
  SITE (1334)..(1334): Xaa can be any naturally occurring amino acid
  SITE (1336)..(1336): Xaa can be any naturally occurring amino acid except Pro or Gly
  SITE (1337)..(1337): Xaa can be any naturally occurring amino acid except Pro or Gly
  SITE (1338)..(1338): Xaa can be any naturally occurring amino acid except Pro or Gly
  SITE (1339)..(1339): Xaa can be any naturally occurring amino acid except Pro or Gly
  SITE (1341)..(1341): Xaa can be any naturally occurring amino acid
  SITE (1342)..(1342): Xaa can be any naturally occurring amino acid
  SITE (1343)..(1343): Xaa can be any naturally occurring amino acid
  SITE (1345)..(1345): Xaa can be any naturally occurring amino acid except Pro or Gly
  SITE (1346)..(1346): Xaa can be any naturally occurring amino acid except Pro or Gly
  SITE (1347)..(1347): Xaa can be any naturally occurring amino acid except Pro or Gly
  SITE (1348)..(1348): Xaa can be any naturally occurring amino acid except Pro or Gly
  SITE (1350)..(1350): Xaa can be any naturally occurring amino acid
  SITE (1351)..(1351): Xaa can be any naturally occurring amino acid
  SITE (1352)..(1352): Xaa can be any naturally occurring amino acid
  SITE (1354)..(1354): Xaa can be any naturally occurring amino acid except Pro or Gly
  SITE (1355)..(1355): Xaa can be any naturally occurring amino acid except Pro or Gly
  SITE (1356)..(1356): Xaa can be any naturally occurring amino acid except Pro or Gly
  SITE (1357)..(1357): Xaa can be any naturally occurring amino acid except Pro or Gly
  SITE (1359)..(1359): Xaa can be any naturally occurring amino acid
  SITE (1360)..(1360): Xaa can be any naturally occurring amino acid
  SITE (1361)..(1361): Xaa can be any naturally occurring amino acid
  SITE (1363)..(1363): Xaa can be any naturally occurring amino acid except Pro or Gly
  SITE (1364)..(1364): Xaa can be any naturally occurring amino acid except Pro or Gly
  SITE (1365)..(1365): Xaa can be any naturally occurring amino acid except Pro or Gly
  SITE (1366)..(1366): Xaa can be any naturally occurring amino acid except Pro or Gly
  SITE (1368)..(1368): Xaa can be any naturally occurring amino acid
  SITE (1369)..(1369): Xaa can be any naturally occurring amino acid
  SITE (1370)..(1370): Xaa can be any naturally occurring amino acid
  SITE (1372)..(1372): Xaa can be any naturally occurring amino acid except Pro or Gly
  SITE (1373)..(1373): Xaa can be any naturally occurring amino acid except Pro or Gly
  SITE (1374)..(1374): Xaa can be any naturally occurring amino acid except Pro or Gly
  SITE (1375)..(1375): Xaa can be any naturally occurring amino acid except Pro or Gly
  SITE (1377)..(1377): Xaa can be any naturally occurring amino acid
  SITE (1378)..(1378): Xaa can be any naturally occurring amino acid
  SITE (1379)..(1379): Xaa can be any naturally occurring amino acid
  SITE (1381)..(1381): Xaa can be any naturally occurring amino acid except Pro or Gly
  SITE (1382)..(1382): Xaa can be any naturally occurring amino acid except Pro or Gly
  SITE (1383)..(1383): Xaa can be any naturally occurring amino acid except Pro or Gly
  SITE (1384)..(1384): Xaa can be any naturally occurring amino acid except Pro or Gly
  SITE (1386)..(1386): Xaa can be any naturally occurring amino acid
  SITE (1387)..(1387): Xaa can be any naturally occurring amino acid
  SITE (1388)..(1388): Xaa can be any naturally occurring amino acid
  SITE (1390)..(1390): Xaa can be any naturally occurring amino acid except Pro or Gly
  SITE (1391)..(1391): Xaa can be any naturally occurring amino acid except Pro or Gly
  SITE (1392)..(1392): Xaa can be any naturally occurring amino acid except Pro or Gly
  SITE (1393)..(1393): Xaa can be any naturally occurring amino acid except Pro or Gly
  SITE (1395)..(1395): Xaa can be any naturally occurring amino acid
  SITE (1396)..(1396): Xaa can be any naturally occurring amino acid
  SITE (1397)..(1397): Xaa can be any naturally occurring amino acid
  SITE (1399)..(1399): Xaa can be any naturally occurring amino acid except Pro or Gly
  SITE (1400)..(1400): Xaa can be any naturally occurring amino acid except Pro or Gly
  SITE (1401)..(1401): Xaa can be any naturally occurring amino acid except Pro or Gly
  SITE (1402)..(1402): Xaa can be any naturally occurring amino acid except Pro or Gly
  SITE (1404)..(1404): Xaa can be any naturally occurring amino acid
  SITE (1405)..(1405): Xaa can be any naturally occurring amino acid
  SITE (1406)..(1406): Xaa can be any naturally occurring amino acid
  SITE (1408)..(1408): Xaa can be any naturally occurring amino acid except Pro or Gly
  SITE (1409)..(1409): Xaa can be any naturally occurring amino acid except Pro or Gly
  SITE (1410)..(1410): Xaa can be any naturally occurring amino acid except Pro or Gly
  SITE (1411)..(1411): Xaa can be any naturally occurring amino acid except Pro or Gly
  SITE (1413)..(1413): Xaa can be any naturally occurring amino acid
  SITE (1414)..(1414): Xaa can be any naturally occurring amino acid
  SITE (1415)..(1415): Xaa can be any naturally occurring amino acid
  SITE (1417)..(1417): Xaa can be any naturally occurring amino acid except Pro or Gly
  SITE (1418)..(1418): Xaa can be any naturally occurring amino acid except Pro or Gly
  SITE (1419)..(1419): Xaa can be any naturally occurring amino acid except Pro or Gly
  SITE (1420)..(1420): Xaa can be any naturally occurring amino acid except Pro or Gly
  SITE (1422)..(1422): Xaa can be any naturally occurring amino acid
  SITE (1423)..(1423): Xaa can be any naturally occurring amino acid
  SITE (1424)..(1424): Xaa can be any naturally occurring amino acid
  SITE (1426)..(1426): Xaa can be any naturally occurring amino acid except Pro or Gly
  SITE (1427)..(1427): Xaa can be any naturally occurring amino acid except Pro or Gly
  SITE (1428)..(1428): Xaa can be any naturally occurring amino acid except Pro or Gly
  SITE (1429)..(1429): Xaa can be any naturally occurring amino acid except Pro or Gly
  SITE (1431)..(1431): Xaa can be any naturally occurring amino acid
  SITE (1432)..(1432): Xaa can be any naturally occurring amino acid
  SITE (1433)..(1433): Xaa can be any naturally occurring amino acid
  SITE (1435)..(1435): Xaa can be any naturally occurring amino acid except Pro or Gly
  SITE (1436)..(1436): Xaa can be any naturally occurring amino acid except Pro or Gly
  SITE (1437)..(1437): Xaa can be any naturally occurring amino acid except Pro or Gly
  SITE (1438)..(1438): Xaa can be any naturally occurring amino acid except Pro or Gly
  SITE (1440)..(1440): Xaa can be any naturally occurring amino acid
XXPXXXXGXXXPXXXXGXXXPXXXXGXXXPXXXXGXXXPXXXXGXXXPXXXXGXXXPXXXXGXXXPXXXXGXXXPXXXXGXXXPXXXXGXXXPXXXXGXXXPXXXXGXXXPXXXXGXXXPXXXXGXXXPXXXXGXXXPXXXXGXXXPXXXXGXXXPXXXXGXXXPXXXXGXXXPXXXXGXXXPXXXXGXXXPXXXXGXXXPXXXXGXXXPXXXXGXXXPXXXXGXXXPXXXXGXXXPXXXXGXXXPXXXXGXXXPXXXXGXXXPXXXXGXXXPXXXXGXXXPXXXXGXXXPXXXXGXXXPXXXXGXXXPXXXXGXXXPXXXXGXXXPXXXXGXXXPXXXXGXXXPXXXXGXXXPXXXXGXXXPXXXXGXXXPXXXXGXXXPXXXXGXXXPXXXXGXXXPXXXXGXXXPXXXXGXXXPXXXXGXXXPXXXXGXXXPXXXXGXXXPXXXXGXXXPXXXXGXXXPXXXXGXXXPXXXXGXXXPXXXXGXXXPXXXXGXXXPXXXXGXXXPXXXXGXXXPXXXXGXXXPXXXXGXXXPXXXXGXXXPXXXXGXXXPXXXXGXXXPXXXXGXXXPXXXXGXXXPXXXXGXXXPXXXXGXXXPXXXXGXXXPXXXXGXXXPXXXXGXXXPXXXXGXXXPXXXXGXXXPXXXXGXXXPXXXXGXXXPXXXXGXXXPXXXXGXXXPXXXXGXXXPXXXXGXXXPXXXXGXXXPXXXXGXXXPXXXXGXXXPXXXXGXXXPXXXXGXXXPXXXXGXXXPXXXXGXXXPXXXXGXXXPXXXXGXXXPXXXXGXXXPXXXXGXXXPXXXXGXXXPXXXXGXXXPXXXXGXXXPXXXXGXXXPXXXXGXXXPXXXXGXXXPXXXXGXXXPXXXXGXXXPXXXXGXXXPXXXXGXXXPXXXXGXXXPXXXXGXXXPXXXXGXXXPXXXXGXXXPXXXXGXXXPXXXXGXXXPXXXXGXXXPXXXXGXXXPXXXXGXXXPXXXXGXXXPXXXXGXXXPXXXXGXXXPXXXXGXXXPXXXXGXXXPXXXXGXXXPXXXXGXXXPXXXXGXXXPXXXXGXXXPXXXXGXXXPXXXXGXXXPXXXXGXXXPXXXXGXXXPXXXXGXXXPXXXXGXXXPXXXXGXXXPXXXXGXXXPXXXXGXXXPXXXXGXXXPXXXXGXXXPXXXXGXXXPXXXXGXXXPXXXXGXXXPXXXXGXXXPXXXXGXXXPXXXXGXXXPXXXXGXXXPXXXXGXXXPXXXXGXXXPXXXXGXXXPXXXXGXXXPXXXXGXXXPXXXXGXXXPXXXXGXXXPXXXXGXXXPXXXXGXXXPXXXXGXXXPXXXXGXXXPXXXXGXXXPXXXXGXXXPXXXXGXXXPXXXXGXXXPXXXXGXXXPXXXXGXXXPXXXXGXXXPXXXXGXXXPXXXXGXXXPXXXXGXXXPXXXXGXXXPXXXXGXXXPXXXXGXXXPXXXXGXXXPXXXXGX

SEQ ID NO: 149 - protein, 960 aa, Artificial Sequence
  elastin-like polypeptide
  SITE (1)..(1): Xaa can be any naturally occurring amino acid
  SITE (2)..(2): Xaa can be any naturally occurring amino acid
  SITE (4)..(4): Xaa can be any naturally occurring amino acid except Pro or Gly
  SITE (6)..(6): Xaa can be any naturally occurring amino acid
  SITE (7)..(7): Xaa can be any naturally occurring amino acid
  SITE (8)..(8): Xaa can be any naturally occurring amino acid
  SITE (10)..(10): Xaa can be any naturally occurring amino acid except Pro or Gly
  SITE (12)..(12): Xaa can be any naturally occurring amino acid
  SITE (13)..(13): Xaa can be any naturally occurring amino acid
  SITE (14)..(14): Xaa can be any naturally occurring amino acid
  SITE (16)..(16): Xaa can be any naturally occurring amino acid except Pro or Gly
  SITE (18)..(18): Xaa can be any naturally occurring amino acid
  SITE (19)..(19): Xaa can be any naturally occurring amino acid
  SITE (20)..(20): Xaa can be any naturally occurring amino acid
  SITE (22)..(22): Xaa can be any naturally occurring amino acid except Pro or Gly
  SITE (24)..(24): Xaa can be any naturally occurring amino acid
  SITE (25)..(25): Xaa can be any naturally occurring amino acid
  SITE (26)..(26): Xaa can be any naturally occurring amino acid
  SITE (28)..(28): Xaa can be any naturally occurring amino acid except Pro or Gly
  SITE (30)..(30): Xaa can be any naturally occurring amino acid
  SITE (31)..(31): Xaa can be any naturally occurring amino acid
  SITE (32)..(32): Xaa can be any naturally occurring amino acid
  SITE (34)..(34): Xaa can be any naturally occurring amino acid except Pro or Gly
  SITE (36)..(36): Xaa can be any naturally occurring amino acid
  SITE (37)..(37): Xaa can be any naturally occurring amino acid
  SITE (38)..(38): Xaa can be any naturally occurring amino acid
  SITE (40)..(40): Xaa can be any naturally occurring amino acid except Pro or Gly
  SITE (42)..(42): Xaa can be any naturally occurring amino acid
  SITE (43)..(43): Xaa can be any naturally occurring amino acid
  SITE (44)..(44): Xaa can be any naturally occurring amino acid
  SITE (46)..(46): Xaa can be any naturally occurring amino acid except Pro or Gly
  SITE (48)..(48): Xaa can be any naturally occurring amino acid
  SITE (49)..(49): Xaa can be any naturally occurring amino acid
  SITE (50)..(50): Xaa can be any naturally occurring amino acid
  SITE (52)..(52): Xaa can be any naturally occurring amino acid except Pro or Gly
  SITE (54)..(54): Xaa can be any naturally occurring amino acid
  SITE (55)..(55): Xaa can be any naturally occurring amino acid
  SITE (56)..(56): Xaa can be any naturally occurring amino acid
  SITE (58)..(58): Xaa can be any naturally occurring amino acid except Pro or Gly
  SITE (60)..(60): Xaa can be any naturally occurring amino acid
  SITE (61)..(960): May be present or absent in groups of the repeat unit Xaa Xaa Pro Xaa Gly Xaa Xaa
  SITE (61)..(61): Xaa can be any naturally occurring amino acid
  SITE (62)..(62): Xaa can be any naturally occurring amino acid
  SITE (64)..(64): Xaa can be any naturally occurring amino acid except Pro or Gly
  SITE (66)..(66): Xaa can be any naturally occurring amino acid
  SITE (67)..(67): Xaa can be any naturally occurring amino acid
  SITE (68)..(68): Xaa can be any naturally occurring amino acid
  SITE (70)..(70): Xaa can be any naturally occurring amino acid except Pro or Gly
  SITE (72)..(72): Xaa can be any naturally occurring amino acid
  SITE (73)..(73): Xaa can be any naturally occurring amino acid
  SITE (74)..(74): Xaa can be any naturally occurring amino acid
  SITE (76)..(76): Xaa can be any naturally occurring amino acid except Pro or Gly
  SITE (78)..(78): Xaa can be any naturally occurring amino acid
  SITE (79)..(79): Xaa can be any naturally occurring amino acid
  SITE (80)..(80): Xaa can be any naturally occurring amino acid
  SITE (82)..(82): Xaa can be any naturally occurring amino acid except Pro or Gly
  SITE (84)..(84): Xaa can be any naturally occurring amino acid
  SITE (85)..(85): Xaa can be any naturally occurring amino acid
  SITE (86)..(86): Xaa can be any naturally occurring amino acid
  SITE (88)..(88): Xaa can be any naturally occurring amino acid except Pro or Gly
  SITE (90)..(90): Xaa can be any naturally occurring amino acid
  SITE (91)..(91): Xaa can be any naturally occurring amino acid
  SITE (92)..(92): Xaa can be any naturally occurring amino acid
  SITE (94)..(94): Xaa can be any naturally occurring amino acid except Pro or Gly
  SITE (96)..(96): Xaa can be any naturally occurring amino acid
  SITE (97)..(97): Xaa can be any naturally occurring amino acid
  SITE (98)..(98): Xaa can be any naturally occurring amino acid
  SITE (100)..(100): Xaa can be any naturally occurring amino acid except Pro or Gly
  SITE (102)..(102): Xaa can be any naturally occurring amino acid
  SITE (103)..(103): Xaa can be any naturally occurring amino acid
  SITE (104)..(104): Xaa can be any naturally occurring amino acid
  SITE (106)..(106): Xaa can be any naturally occurring amino acid except Pro or Gly
  SITE (108)..(108): Xaa can be any naturally occurring amino acid
  SITE (109)..(109): Xaa can be any naturally occurring amino acid
  SITE (110)..(110): Xaa can be any naturally occurring amino acid
  SITE (112)..(112): Xaa can be any naturally occurring amino acid except Pro or Gly
  SITE (114)..(114): Xaa can be any naturally occurring amino acid
  SITE (115)..(115): Xaa can be any naturally occurring amino acid
  SITE (116)..(116): Xaa can be any naturally occurring amino acid
  SITE (118)..(118): Xaa can be any naturally occurring amino acid except Pro or Gly
  SITE (120)..(120): Xaa can be any naturally occurring amino acid
  SITE (121)..(121): Xaa can be any naturally occurring amino acid
  SITE (122)..(122): Xaa can be any naturally occurring amino acid
  SITE (124)..(124): Xaa can be any naturally occurring amino acid except Pro or Gly
  SITE (126)..(126): Xaa can be any naturally occurring amino acid
  SITE (127)..(127): Xaa can be any naturally occurring amino acid
  SITE (128)..(128): Xaa can be any naturally occurring amino acid
  SITE (130)..(130): Xaa can be any naturally occurring amino acid except Pro or Gly
  SITE (132)..(132): Xaa can be any naturally occurring amino acid
  SITE (133)..(133): Xaa can be any naturally occurring amino acid
  SITE (134)..(134): Xaa can be any naturally occurring amino acid
  SITE (136)..(136): Xaa can be any naturally occurring amino acid except Pro or Gly
  SITE (138)..(138): Xaa can be any naturally occurring amino acid
  SITE (139)..(139): Xaa can be any naturally occurring amino acid
  SITE (140)..(140): Xaa can be any naturally occurring amino acid
  SITE (142)..(142): Xaa can be any naturally occurring amino acid except Pro or Gly
  SITE (144)..(144): Xaa can be any naturally occurring amino acid
  SITE (145)..(145): Xaa can be any naturally occurring amino acid
  SITE (146)..(146): Xaa can be any naturally occurring amino acid
  SITE (148)..(148): Xaa can be any naturally occurring amino acid except Pro or Gly
  SITE (150)..(150): Xaa can be any naturally occurring amino acid
  SITE (151)..(151): Xaa can be any naturally occurring amino acid
  SITE (152)..(152): Xaa can be any naturally occurring amino acid
  SITE (154)..(154): Xaa can be any naturally occurring amino acid except Pro or Gly
  SITE (156)..(156): Xaa can be any naturally occurring amino acid
  SITE (157)..(157): Xaa can be any naturally occurring amino acid
  SITE (158)..(158): Xaa can be any naturally occurring amino acid
  SITE (160)..(160): Xaa can be any naturally occurring amino acid except Pro or Gly
  SITE (162)..(162): Xaa can be any naturally occurring amino acid
  SITE (163)..(163): Xaa can be any naturally occurring amino acid
  SITE (164)..(164): Xaa can be any naturally occurring amino acid
  SITE (166)..(166): Xaa can be any naturally occurring amino acid except Pro or Gly
  SITE (168)..(168): Xaa can be any naturally occurring amino acid
  SITE (169)..(169): Xaa can be any naturally occurring amino acid
  SITE (170)..(170): Xaa can be any naturally occurring amino acid
  SITE (172)..(172): Xaa can be any naturally occurring amino acid except Pro or Gly
  SITE (174)..(174): Xaa can be any naturally occurring amino acid
  SITE (175)..(175): Xaa can be any naturally occurring amino acid
  SITE (176)..(176): Xaa can be any naturally occurring amino acid
  SITE (178)..(178): Xaa can be any naturally occurring amino acid except Pro or Gly
  SITE (180)..(180): Xaa can be any naturally occurring amino acid
  SITE (181)..(181): Xaa can be any naturally occurring amino acid
  SITE (182)..(182): Xaa can be any naturally occurring amino acid
  SITE (184)..(184): Xaa can be any naturally occurring amino acid except Pro or Gly
  SITE (186)..(186): Xaa can be any naturally occurring amino acid
  SITE (187)..(187): Xaa can be any naturally occurring amino acid
  SITE (188)..(188): Xaa can be any naturally occurring amino acid
  SITE (190)..(190): Xaa can be any naturally occurring amino acid except Pro or Gly
  SITE (192)..(192): Xaa can be any naturally occurring amino acid
  SITE (193)..(193): Xaa can be any naturally occurring amino acid
  SITE (194)..(194): Xaa can be any naturally occurring amino acid
  SITE (196)..(196): Xaa can be any naturally occurring amino acid except Pro or Gly
  SITE (198)..(198): Xaa can be any naturally occurring amino acid
  SITE (199)..(199): Xaa can be any naturally occurring amino acid
  SITE (200)..(200): Xaa can be any naturally occurring amino acid
  SITE (202)..(202): Xaa can be any naturally occurring amino acid except Pro or Gly
  SITE (204)..(204): Xaa can be any naturally occurring amino acid
  SITE (205)..(205): Xaa can be any naturally occurring amino acid
  SITE (206)..(206): Xaa can be any naturally occurring amino acid
  SITE (208)..(208): Xaa can be any naturally occurring amino acid except Pro or Gly
  SITE (210)..(210): Xaa can be any naturally occurring amino acid
  SITE (211)..(211): Xaa can be any naturally occurring amino acid
  SITE (212)..(212): Xaa can be any naturally occurring amino acid
  SITE (214)..(214): Xaa can be any naturally occurring amino acid except Pro or Gly
  SITE (216)..(216): Xaa can be any naturally occurring amino acid
  SITE (217)..(217): Xaa can be any naturally occurring amino acid
  SITE (218)..(218): Xaa can be any naturally occurring amino acid
  SITE (220)..(220): Xaa can be any naturally occurring amino acid except Pro or Gly
  SITE (222)..(222): Xaa can be any naturally occurring amino acid
  SITE (223)..(223): Xaa can be any naturally occurring amino acid
  SITE (224)..(224): Xaa can be any naturally occurring amino acid
  SITE (226)..(226): Xaa can be any naturally occurring amino acid except Pro or Gly
  SITE (228)..(228): Xaa can be any naturally occurring amino acid
  SITE (229)..(229): Xaa can be any naturally occurring amino acid
  SITE (230)..(230): Xaa can be any naturally occurring amino acid
  SITE (232)..(232): Xaa can be any naturally occurring amino acid except Pro or Gly
  SITE (234)..(234): Xaa can be any naturally occurring amino acid
  SITE (235)..(235): Xaa can be any naturally occurring amino acid
  SITE (236)..(236): Xaa can be any naturally occurring amino acid
  SITE (238)..(238): Xaa can be any naturally occurring amino acid except Pro or Gly
  SITE (240)..(240): Xaa can be any naturally occurring amino acid
  SITE (241)..(241): Xaa can be any naturally occurring amino acid
  SITE (242)..(242): Xaa can be any naturally occurring amino acid
  SITE (244)..(244): Xaa can be any naturally occurring amino acid except Pro or Gly
  SITE (246)..(246): Xaa can be any naturally occurring amino acid
  SITE (247)..(247): Xaa can be any naturally occurring amino acid
  SITE (248)..(248): Xaa can be any naturally occurring amino acid
  SITE (250)..(250): Xaa can be any naturally occurring amino acid except Pro or Gly
  SITE (252)..(252): Xaa can be any naturally occurring amino acid
  SITE (253)..(253): Xaa can be any naturally occurring amino acid
  SITE (254)..(254): Xaa can be any naturally occurring amino acid
  SITE (256)..(256): Xaa can be any naturally occurring amino acid except Pro or Gly
  SITE (258)..(258): Xaa can be any naturally occurring amino acid
  SITE (259)..(259): Xaa can be any naturally occurring amino acid
  SITE (260)..(260): Xaa can be any naturally occurring amino acid
  SITE (262)..(262): Xaa can be any naturally occurring amino acid except Pro or Gly
  SITE (264)..(264): Xaa can be any naturally occurring amino acid
  SITE (265)..(265): Xaa can be any naturally occurring amino acid
  SITE (266)..(266): Xaa can be any naturally occurring amino acid
  SITE (268)..(268): Xaa can be any naturally occurring amino acid except Pro or Gly
  SITE (270)..(270): Xaa can be any naturally occurring amino acid
  SITE (271)..(271): Xaa can be any naturally occurring amino acid
  SITE (272)..(272): Xaa can be any naturally occurring amino acid
  SITE (274)..(274): Xaa can be any naturally occurring amino acid except Pro or Gly
  SITE (276)..(276): Xaa can be any naturally occurring amino acid
  SITE (277)..(277): Xaa can be any naturally occurring amino acid
  SITE (278)..(278): Xaa can be any naturally occurring amino acid
  SITE (280)..(280): Xaa can be any naturally occurring amino acid except Pro or Gly
  SITE (282)..(282): Xaa can be any naturally occurring amino acid
  SITE (283)..(283): Xaa can be any naturally occurring amino acid
  SITE (284)..(284): Xaa can be any naturally occurring amino acid
  SITE (286)..(286): Xaa can be any naturally occurring amino acid except Pro or Gly
  SITE (288)..(288): Xaa can be any naturally occurring amino acid
  SITE (289)..(289): Xaa can be any naturally occurring amino acid
  SITE (290)..(290): Xaa can be any naturally occurring amino acid
  SITE (292)..(292): Xaa can be any naturally occurring amino acid except Pro or Gly
  SITE (294)..(294): Xaa can be any naturally occurring amino acid
  SITE (295)..(295): Xaa can be any naturally occurring amino acid
  SITE (296)..(296): Xaa can be any naturally occurring amino acid
  SITE (298)..(298): Xaa can be any naturally occurring amino acid except Pro or Gly
  SITE (300)..(300): Xaa can be any naturally occurring amino acid
  SITE (301)..(301): Xaa can be any naturally occurring amino acid
  SITE (302)..(302): Xaa can be any naturally occurring amino acid
  SITE (304)..(304): Xaa can be any naturally occurring amino acid except Pro or Gly
  SITE (306)..(306): Xaa can be any naturally occurring amino acid
  SITE (307)..(307): Xaa can be any naturally occurring amino acid
  SITE (308)..(308): Xaa can be any naturally occurring amino acid
  SITE (310)..(310): Xaa can be any naturally occurring amino acid except Pro or Gly
  SITE (312)..(312): Xaa can be any naturally occurring amino acid
  SITE (313)..(313): Xaa can be any naturally occurring amino acid
  SITE (314)..(314): Xaa can be any naturally occurring amino acid
  SITE (316)..(316): Xaa can be any naturally occurring amino acid except Pro or Gly
  SITE (318)..(318): Xaa can be any naturally occurring amino acid
  SITE (319)..(319): Xaa can be any naturally occurring amino acid
  SITE (320)..(320): Xaa can be any naturally occurring amino acid
  SITE (322)..(322): Xaa can be any naturally occurring amino acid except Pro or Gly
  SITE (324)..(324): Xaa can be any naturally occurring amino acid
  SITE (325)..(325): Xaa can be any naturally occurring amino acid
  SITE (326)..(326): Xaa can be any naturally occurring amino acid
  SITE (328)..(328): Xaa can be any naturally occurring amino acid except Pro or Gly
  SITE (330)..(330): Xaa can be any naturally occurring amino acid
  SITE (331)..(331): Xaa can be any naturally occurring amino acid
  SITE (332)..(332): Xaa can be any naturally occurring amino acid
  SITE (334)..(334): Xaa can be any naturally occurring amino acid except Pro or Gly
  SITE (336)..(336): Xaa can be any naturally occurring amino acid
  SITE (337)..(337): Xaa can be any naturally occurring amino acid
  SITE (338)..(338): Xaa can be any naturally occurring amino acid
  SITE (340)..(340): Xaa can be any naturally occurring amino acid except Pro or Gly
  SITE (342)..(342): Xaa can be any naturally occurring amino acid
  SITE (343)..(343): Xaa can be any naturally occurring amino acid
  SITE (344)..(344): Xaa can be any naturally occurring amino acid
  SITE (346)..(346): Xaa can be any naturally occurring amino acid except Pro or Gly
  SITE (348)..(348): Xaa can be any naturally occurring amino acid
  SITE (349)..(349): Xaa can be any naturally occurring amino acid
  SITE (350)..(350): Xaa can be any naturally occurring amino acid
  SITE (352)..(352): Xaa can be any naturally occurring amino acid except Pro or Gly
  SITE (354)..(354): Xaa can be any naturally occurring amino acid
  SITE (355)..(355): Xaa can be any naturally occurring amino acid
  SITE (356)..(356): Xaa can be any naturally occurring amino acid
  SITE (358)..(358): Xaa can be any naturally occurring amino acid except Pro or Gly
  SITE (360)..(360): Xaa can be any naturally occurring amino acid
  SITE (361)..(361): Xaa can be any naturally occurring amino acid
  SITE (362)..(362): Xaa can be any naturally occurring amino acid
  SITE (364)..(364): Xaa can be any naturally occurring amino acid except Pro or Gly
  SITE (366)..(366): Xaa can be any naturally occurring amino acid
  SITE (367)..(367): Xaa can be any naturally occurring amino acid
  SITE (368)..(368): Xaa can be any naturally occurring amino acid
  SITE (370)..(370): Xaa can be any naturally occurring amino acid except Pro or Gly
  SITE (372)..(372): Xaa can be any naturally occurring amino acid
  SITE (373)..(373): Xaa can be any naturally occurring amino acid
  SITE (374)..(374): Xaa can be any naturally occurring amino acid
  SITE (376)..(376): Xaa can be any naturally occurring amino acid except Pro or Gly
  SITE (378)..(378): Xaa can be any naturally occurring amino acid
  SITE (379)..(379): Xaa can be any naturally occurring amino acid
  SITE (380)..(380): Xaa can be any naturally occurring amino acid
  SITE (382)..(382): Xaa can be any naturally occurring amino acid except Pro or Gly
  SITE (384)..(384): Xaa can be any naturally occurring amino acid
  SITE (385)..(385): Xaa can be any naturally occurring amino acid
  SITE (386)..(386): Xaa can be any naturally occurring amino acid
  SITE (388)..(388): Xaa can be any naturally occurring amino acid except Pro or Gly
  SITE (390)..(390): Xaa can be any naturally occurring amino acid
  SITE (391)..(391): Xaa can be any naturally occurring amino acid
  SITE (392)..(392): Xaa can be any naturally occurring amino acid
  SITE (394)..(394): Xaa can be any naturally occurring amino acid except Pro or Gly
  SITE (396)..(396): Xaa can be any naturally occurring amino acid
  SITE (397)..(397): Xaa can be any naturally occurring amino acid
  SITE (398)..(398): Xaa can be any naturally occurring amino acid
  SITE (400)..(400): Xaa can be any naturally occurring amino acid except Pro or Gly
  SITE (402)..(402): Xaa can be any naturally occurring amino acid
  SITE (403)..(403): Xaa can be any naturally occurring amino acid
  SITE (404)..(404): Xaa can be any naturally occurring amino acid
  SITE (406)..(406): Xaa can be any naturally occurring amino acid except Pro or Gly
  SITE (408)..(408): Xaa can be any naturally occurring amino acid
  SITE (409)..(409): Xaa can be any naturally occurring amino acid
  SITE (410)..(410): Xaa can be any naturally occurring amino acid
  SITE (412)..(412): Xaa can be any naturally occurring amino acid except Pro or Gly
  SITE (414)..(414): Xaa can be any naturally occurring amino acid
  SITE (415)..(415): Xaa can be any naturally occurring amino acid
  SITE (416)..(416): Xaa can be any naturally occurring amino acid
  SITE (418)..(418): Xaa can be any naturally occurring amino acid except Pro or Gly
  SITE (420)..(420): Xaa can be any naturally occurring amino acid
  SITE (421)..(421): Xaa can be any naturally occurring amino acid
  SITE (422)..(422): Xaa can be any naturally occurring amino acid
  SITE (424)..(424): Xaa can be any naturally occurring amino acid except Pro or Gly
  SITE (426)..(426): Xaa can be any naturally occurring amino acid
  SITE (427)..(427): Xaa can be any naturally occurring amino acid
  SITE (428)..(428): Xaa can be any naturally occurring amino acid
  SITE (430)..(430): Xaa can be any naturally occurring amino acid except Pro or Gly
  SITE (432)..(432): Xaa can be any naturally occurring amino acid
  SITE (433)..(433): Xaa can be any naturally occurring amino acid
  SITE (434)..(434): Xaa can be any naturally occurring amino acid
  SITE (436)..(436): Xaa can be any naturally occurring amino acid except Pro or Gly
  SITE (438)..(438): Xaa can be any naturally occurring amino acid
  SITE (439)..(439): Xaa can be any naturally occurring amino acid
  SITE (440)..(440): Xaa can be any naturally occurring amino acid
  SITE (442)..(442): Xaa can be any naturally occurring amino acid except Pro or Gly
  SITE (444)..(444): Xaa can be any naturally occurring amino acid
  SITE (445)..(445): Xaa can be any naturally occurring amino acid
  SITE (446)..(446): Xaa can be any naturally occurring amino acid
  SITE (448)..(448): Xaa can be any naturally occurring amino acid except Pro or Gly
  SITE (450)..(450): Xaa can be any naturally occurring amino acid
  SITE (451)..(451): Xaa can be any naturally occurring amino acid
  SITE (452)..(452): Xaa can be any naturally occurring amino acid
  SITE (454)..(454): Xaa can be any naturally occurring amino acid except Pro or Gly
  SITE (456)..(456): Xaa can be any naturally occurring amino acid
  SITE (457)..(457): Xaa can be any naturally occurring amino acid
  SITE (458)..(458): Xaa can be any naturally occurring amino acid
  SITE (460)..(460): Xaa can be any naturally occurring amino acid except Pro or Gly
  SITE (462)..(462): Xaa can be any naturally occurring amino acid
  SITE (463)..(463): Xaa can be any naturally occurring amino acid
  SITE (464)..(464): Xaa can be any naturally occurring amino acid
  SITE (466)..(466): Xaa can be any naturally occurring amino acid except Pro or Gly
  SITE (468)..(468): Xaa can be any naturally occurring amino acid
  SITE (469)..(469): Xaa can be any naturally occurring amino acid
  SITE (470)..(470): Xaa can be any naturally occurring amino acid
  SITE (472)..(472): Xaa can be any naturally occurring amino acid except Pro or Gly
  SITE (474)..(474): Xaa can be any naturally occurring amino acid
  SITE (475)..(475): Xaa can be any naturally occurring amino acid
  SITE (476)..(476): Xaa can be any naturally occurring amino acid
  SITE (478)..(478): Xaa can be any naturally occurring amino acid except Pro or Gly
  SITE (480)..(480): Xaa can be any naturally occurring amino acid
  SITE (481)..(481): Xaa can be any naturally occurring amino acid
  SITE (482)..(482): Xaa can be any naturally occurring amino acid
  SITE (484)..(484): Xaa can be any naturally occurring amino acid except Pro or Gly
  SITE (486)..(486): Xaa can be any naturally occurring amino acid
  SITE (487)..(487): Xaa can be any naturally occurring amino acid
  SITE (488)..(488): Xaa can be any naturally occurring amino acid
  SITE (490)..(490): Xaa can be any naturally occurring amino acid except Pro or Gly
  SITE (492)..(492): Xaa can be any naturally occurring amino acid
  SITE (493)..(493): Xaa can be any naturally occurring amino acid
  SITE (494)..(494): Xaa can be any naturally occurring amino acid
  SITE (496)..(496): Xaa can be any naturally occurring amino acid except Pro or Gly
  SITE (498)..(498): Xaa can be any naturally occurring amino acid
  SITE (499)..(499): Xaa can be any naturally occurring amino acid
  SITE (500)..(500): Xaa can be any naturally occurring amino acid
  SITE (502)..(502): Xaa can be any naturally occurring amino acid except Pro or Gly
  SITE (504)..(504): Xaa can be any naturally occurring amino acid
  SITE (505)..(505): Xaa can be any naturally occurring amino acid
  SITE (506)..(506): Xaa can be any naturally occurring amino acid
  SITE (508)..(508): Xaa can be any naturally occurring amino acid except Pro or Gly
  SITE (510)..(510): Xaa can be any naturally occurring amino acid
  SITE (511)..(511): Xaa can be any naturally occurring amino acid
  SITE (512)..(512): Xaa can be any naturally occurring amino acid
  SITE (514)..(514): Xaa can be any naturally occurring amino acid except Pro or Gly
  SITE (516)..(516): Xaa can be any naturally occurring amino acid
  SITE (517)..(517): Xaa can be any naturally occurring amino acid
  SITE (518)..(518): Xaa can be any naturally occurring amino acid
  SITE (520)..(520): Xaa can be any naturally occurring amino acid except Pro or Gly
  SITE (522)..(522): Xaa can be any naturally occurring amino acid
  SITE (523)..(523): Xaa can be any naturally occurring amino acid
  SITE (524)..(524): Xaa can be any naturally occurring amino acid
  SITE (526)..(526): Xaa can be any naturally occurring amino acid except Pro or Gly
  SITE (528)..(528): Xaa can be any naturally occurring amino acid
  SITE (529)..(529): Xaa can be any naturally occurring amino acid
  SITE (530)..(530): Xaa can be any naturally occurring amino acid
  SITE (532)..(532): Xaa can be any naturally occurring amino acid except Pro or Gly
  SITE (534)..(534): Xaa can be any naturally occurring amino acid
  SITE (535)..(535): Xaa can be any naturally occurring amino acid
  SITE (536)..(536): Xaa can be any naturally occurring amino acid
  SITE (538)..(538): Xaa can be any naturally occurring amino acid except Pro or Gly
  SITE (540)..(540): Xaa can be any naturally occurring amino acid
  SITE (541)..(541): Xaa can be any naturally occurring amino acid
  SITE (542)..(542): Xaa can be any naturally occurring amino acid
  SITE (544)..(544): Xaa can be any naturally occurring amino acid except Pro or Gly
  SITE (546)..(546): Xaa can be any naturally occurring amino acid
  SITE (547)..(547): Xaa can be any naturally occurring amino acid
  SITE (548)..(548): Xaa can be any naturally occurring amino acid
  SITE (550)..(550): Xaa can be any naturally occurring amino acid except Pro or Gly
  SITE (552)..(552): Xaa can be any naturally occurring amino acid
  SITE (553)..(553): Xaa can be any naturally occurring amino acid
  SITE (554)..(554): Xaa can be any naturally occurring amino acid
  SITE (556)..(556): Xaa can be any naturally occurring amino acid except Pro or Gly
  SITE (558)..(558): Xaa can be any naturally occurring amino acid
  SITE (559)..(559): Xaa can be any naturally occurring amino acid
  SITE (560)..(560): Xaa can be any naturally occurring amino acid
  SITE (562)..(562): Xaa can be any naturally occurring amino acid except Pro or Gly
  SITE (564)..(564): Xaa can be any naturally occurring amino acid
  SITE (565)..(565): Xaa can be any naturally occurring amino acid
  SITE (566)..(566): Xaa can be any naturally occurring amino acid
  SITE (568)..(568): Xaa can be any naturally occurring amino acid except Pro or Gly
  SITE (570)..(570): Xaa can be any naturally occurring amino acid
  SITE (571)..(571): Xaa can be any naturally occurring amino acid
  SITE (572)..(572): Xaa can be any naturally occurring amino acid
  SITE (574)..(574): Xaa can be any naturally occurring amino acid except Pro or Gly
  SITE (576)..(576): Xaa can be any naturally occurring amino acid
  SITE (577)..(577): Xaa can be any naturally occurring amino acid
  SITE (578)..(578): Xaa can be any naturally occurring amino acid
  SITE (580)..(580): Xaa can be any naturally occurring amino acid except Pro or Gly
  SITE (582)..(582): Xaa can be any naturally occurring amino acid
  SITE (583)..(583): Xaa can be any naturally occurring amino acid
  SITE (584)..(584): Xaa can be any naturally occurring amino acid
  SITE (586)..(586): Xaa can be any naturally occurring amino acid except Pro or Gly
  SITE (588)..(588): Xaa can be any naturally occurring amino acid
  SITE (589)..(589): Xaa can be any naturally occurring amino acid
  SITE (590)..(590): Xaa can be any naturally occurring amino acid
  SITE (592)..(592): Xaa can be any naturally occurring amino acid except Pro or Gly
  SITE (594)..(594): Xaa can be any naturally occurring amino acid
  SITE (595)..(595): Xaa can be any naturally occurring amino acid
  SITE (596)..(596): Xaa can be any naturally occurring amino acid
  SITE (598)..(598): Xaa can be any naturally occurring amino acid except Pro or Gly
  SITE (600)..(600): Xaa can be any naturally occurring amino acid
  SITE (601)..(601): Xaa can be any naturally occurring amino acid
  SITE (602)..(602): Xaa can be any naturally occurring amino acid
  SITE (604)..(604): Xaa can be any naturally occurring amino acid except Pro or Gly
  SITE (606)..(606): Xaa can be any naturally occurring amino acid
  SITE (607)..(607): Xaa can be any naturally occurring amino acid
  SITE (608)..(608): Xaa can be any naturally occurring amino acid
  SITE (610)..(610): Xaa can be any naturally occurring amino acid except Pro or Gly
  SITE (612)..(612): Xaa can be any naturally occurring amino acid
  SITE (613)..(613): Xaa can be any naturally occurring amino acid
  SITE (614)..(614): Xaa can be any naturally occurring amino acid
  SITE (616)..(616): Xaa can be any naturally occurring amino acid except Pro or Gly
  SITE (618)..(618): Xaa can be any naturally occurring amino acid
  SITE (619)..(619): Xaa can be any naturally occurring amino acid
  SITE (620)..(620): Xaa can be any naturally occurring amino acid
  SITE (622)..(622): Xaa can be any naturally occurring amino acid except Pro or Gly
  SITE (624)..(624): Xaa can be any naturally occurring amino acid
  SITE (625)..(625): Xaa can be any naturally occurring amino acid
  SITE (626)..(626): Xaa can be any naturally occurring amino acid
  SITE (628)..(628): Xaa can be any naturally occurring amino acid except Pro or Gly
  SITE (630)..(630): Xaa can be any naturally occurring amino acid
  SITE (631)..(631): Xaa can be any naturally occurring amino acid
  SITE (632)..(632): Xaa can be any naturally occurring amino acid
  SITE (634)..(634): Xaa can be any naturally occurring amino acid except Pro or Gly
  SITE (636)..(636): Xaa can be any naturally occurring amino acid
  SITE (637)..(637): Xaa can be any naturally occurring amino acid
  SITE (638)..(638): Xaa can be any naturally occurring amino acid
  SITE (640)..(640): Xaa can be any naturally occurring amino acid except Pro or Gly
  SITE (642)..(642): Xaa can be any naturally occurring amino acid
  SITE (643)..(643): Xaa can be any naturally occurring amino acid
  SITE (644)..(644): Xaa can be any naturally occurring amino acid
  SITE (646)..(646): Xaa can be any naturally occurring amino acid except Pro or Gly
  SITE (648)..(648): Xaa can be any naturally occurring amino acid
  SITE (649)..(649): Xaa can be any naturally occurring amino acid
  SITE (650)..(650): Xaa can be any naturally occurring amino acid
  SITE (652)..(652): Xaa can be any naturally occurring amino acid except Pro or Gly
  SITE (654)..(654): Xaa can be any naturally occurring amino acid
  SITE (655)..(655): Xaa can be any naturally occurring amino acid
  SITE (656)..(656): Xaa can be any naturally occurring amino acid
  SITE (658)..(658): Xaa can be any naturally occurring amino acid except Pro or Gly
  SITE (660)..(660): Xaa can be any naturally occurring amino acid
  SITE (661)..(661): Xaa can be any naturally occurring amino acid
  SITE (662)..(662): Xaa can be any naturally occurring amino acid
  SITE (664)..(664): Xaa can be any naturally occurring amino acid except Pro or Gly
  SITE (666)..(666): Xaa can be any naturally occurring amino acid
  SITE (667)..(667): Xaa can be any naturally occurring amino acid
  SITE (668)..(668): Xaa can be any naturally occurring amino acid
  SITE (670)..(670): Xaa can be any naturally occurring amino acid except Pro or Gly
  SITE (672)..(672): Xaa can be any naturally occurring amino acid
  SITE (673)..(673): Xaa can be any naturally occurring amino acid
  SITE (674)..(674): Xaa can be any naturally occurring amino acid
  SITE (676)..(676): Xaa can be any naturally occurring amino acid except Pro or Gly
  SITE (678)..(678): Xaa can be any naturally occurring amino acid
  SITE (679)..(679): Xaa can be any naturally occurring amino acid
  SITE (680)..(680): Xaa can be any naturally occurring amino acid
  SITE (682)..(682): Xaa can be any naturally occurring amino acid except Pro or Gly
  SITE (684)..(684): Xaa can be any naturally occurring amino acid
  SITE (685)..(685): Xaa can be any naturally occurring amino acid
  SITE (686)..(686): Xaa can be any naturally occurring amino acid
  SITE (688)..(688): Xaa can be any naturally occurring amino acid except Pro or Gly
  SITE (690)..(690): Xaa can be any naturally occurring amino acid
  SITE (691)..(691): Xaa can be any naturally occurring amino acid
  SITE (692)..(692): Xaa can be any naturally occurring amino acid
  SITE (694)..(694): Xaa can be any naturally occurring amino acid except Pro or Gly
  SITE (696)..(696): Xaa can be any naturally occurring amino acid
  SITE (697)..(697): Xaa can be any naturally occurring amino acid
  SITE (698)..(698): Xaa can be any naturally occurring amino acid
  SITE (700)..(700): Xaa can be any naturally occurring amino acid except Pro or Gly
  SITE (702)..(702): Xaa can be any naturally occurring amino acid
  SITE (703)..(703): Xaa can be any naturally occurring amino acid
  SITE (704)..(704): Xaa can be any naturally occurring amino acid
  SITE (706)..(706): Xaa can be any naturally occurring amino acid except Pro or Gly
  SITE (708)..(708): Xaa can be any naturally occurring amino acid
  SITE (709)..(709): Xaa can be any naturally occurring amino acid
  SITE (710)..(710): Xaa can be any naturally occurring amino acid
  SITE (712)..(712): Xaa can be any naturally occurring amino acid except Pro or Gly
  SITE (714)..(714): Xaa can be any naturally occurring amino acid
  SITE (715)..(715): Xaa can be any naturally occurring amino acid
  SITE (716)..(716): Xaa can be any naturally occurring amino acid
  SITE (718)..(718): Xaa can be any naturally occurring amino acid except Pro or Gly
  SITE (720)..(720): Xaa can be any naturally occurring amino acid
  SITE (721)..(721): Xaa can be any naturally occurring amino acid
  SITE (722)..(722): Xaa can be any naturally occurring amino acid
  SITE (724)..(724): Xaa can be any naturally occurring amino acid except Pro or Gly
  SITE (726)..(726): Xaa can be any naturally occurring amino acid
  SITE (727)..(727): Xaa can be any naturally occurring amino acid
  SITE (728)..(728): Xaa can be any naturally occurring amino acid
  SITE (730)..(730): Xaa can be any naturally occurring amino acid except Pro or Gly
  SITE (732)..(732): Xaa can be any naturally occurring amino acid
  SITE (733)..(733): Xaa can be any naturally occurring amino acid
  SITE (734)..(734): Xaa can be any naturally occurring amino acid
  SITE (736)..(736): Xaa can be any naturally occurring amino acid except Pro or Gly
  SITE (738)..(738): Xaa can be any naturally occurring amino acid
  SITE (739)..(739): Xaa can be any naturally occurring amino acid
  SITE (740)..(740): Xaa can be any naturally occurring amino acid
  SITE (742)..(742): Xaa can be any naturally occurring amino acid except Pro or Gly
  SITE (744)..(744): Xaa can be any naturally occurring amino acid
  SITE (745)..(745): Xaa can be any naturally occurring amino acid
  SITE (746)..(746): Xaa can be any naturally occurring amino acid
  SITE (748)..(748): Xaa can be any naturally occurring amino acid except Pro or Gly
  SITE (750)..(750): Xaa can be any naturally occurring amino acid
  SITE (751)..(751): Xaa can be any naturally occurring amino acid
  SITE (752)..(752): Xaa can be any naturally occurring amino acid
  SITE (754)..(754): Xaa can be any naturally occurring amino acid except Pro or Gly
  SITE (756)..(756): Xaa can be any naturally occurring amino acid
  SITE (757)..(757): Xaa can be any naturally occurring amino acid
  SITE (758)..(758): Xaa can be any naturally occurring amino acid
  SITE (760)..(760): Xaa can be any naturally occurring amino acid except Pro or Gly
  SITE (762)..(762): Xaa can be any naturally occurring amino acid
  SITE (763)..(763): Xaa can be any naturally occurring amino acid
  SITE (764)..(764): Xaa can be any naturally occurring amino acid
  SITE (766)..(766): Xaa can be any naturally occurring amino acid except Pro or Gly
  SITE (768)..(768): Xaa can be any naturally occurring amino acid
  SITE (769)..(769): Xaa can be any naturally occurring amino acid
  SITE (770)..(770): Xaa can be any naturally occurring amino acid
  SITE (772)..(772): Xaa can be any naturally occurring amino acid except Pro or Gly
  SITE (774)..(774): Xaa can be any naturally occurring amino acid
  SITE (775)..(775): Xaa can be any naturally occurring amino acid
  SITE (776)..(776): Xaa can be any naturally occurring amino acid
  SITE (778)..(778): Xaa can be any naturally occurring amino acid except Pro or Gly
  SITE (780)..(780): Xaa can be any naturally occurring amino acid
  SITE (781)..(781): Xaa can be any naturally occurring amino acid
  SITE (782)..(782): Xaa can be any naturally occurring amino acid
  SITE (784)..(784): Xaa can be any naturally occurring amino acid except Pro or Gly
  SITE (786)..(786): Xaa can be any naturally occurring amino acid
  SITE (787)..(787): Xaa can be any naturally occurring amino acid
  SITE (788)..(788): Xaa can be any naturally occurring amino acid
  SITE (790)..(790): Xaa can be any naturally occurring amino acid except Pro or Gly
  SITE (792)..(792): Xaa can be any naturally occurring amino acid
  SITE (793)..(793): Xaa can be any naturally occurring amino acid
  SITE (794)..(794): Xaa can be any naturally occurring amino acid
  SITE (796)..(796): Xaa can be any naturally occurring amino acid except Pro or Gly
  SITE (798)..(798): Xaa can be any naturally occurring amino acid
  SITE (799)..(799): Xaa can be any naturally occurring amino acid
  SITE (800)..(800): Xaa can be any naturally occurring amino acid
  SITE (802)..(802): Xaa can be any naturally occurring amino acid except Pro or Gly
  SITE (804)..(804): Xaa can be any naturally occurring amino acid
  SITE (805)..(805): Xaa can be any naturally occurring amino acid
  SITE (806)..(806): Xaa can be any naturally occurring amino acid
  SITE (808)..(808): Xaa can be any naturally occurring amino acid except Pro or Gly
  SITE (810)..(810): Xaa can be any naturally occurring amino acid
  SITE (811)..(811): Xaa can be any naturally occurring amino acid
  SITE (812)..(812): Xaa can be any naturally occurring amino acid
  SITE (814)..(814): Xaa can be any naturally occurring amino acid except Pro or Gly
  SITE (816)..(816): Xaa can be any naturally occurring amino acid
  SITE (817)..(817): Xaa can be any naturally occurring amino acid
  SITE (818)..(818): Xaa can be any naturally occurring amino acid
  SITE (820)..(820): Xaa can be any naturally occurring amino acid except Pro or Gly
  SITE (822)..(822): Xaa can be any naturally occurring amino acid
  SITE (823)..(823): Xaa can be any naturally occurring amino acid
  SITE (824)..(824): Xaa can be any naturally occurring amino acid
  SITE (826)..(826): Xaa can be any naturally occurring amino acid except Pro or Gly
  SITE (828)..(828): Xaa can be any naturally occurring amino acid
  SITE (829)..(829): Xaa can be any naturally occurring amino acid
  SITE (830)..(830): Xaa can be any naturally occurring amino acid
  SITE (832)..(832): Xaa can be any naturally occurring amino acid except Pro or Gly
  SITE (834)..(834): Xaa can be any naturally occurring amino acid
  SITE (835)..(835): Xaa can be any naturally occurring amino acid
  SITE (836)..(836): Xaa can be any naturally occurring amino acid
  SITE (838)..(838): Xaa can be any naturally occurring amino acid except Pro or Gly
  SITE (840)..(840): Xaa can be any naturally occurring amino acid
  SITE (841)..(841): Xaa can be any naturally occurring amino acid
  SITE (842)..(842): Xaa can be any naturally occurring amino acid
  SITE (844)..(844): Xaa can be any naturally occurring amino acid except Pro or Gly
  SITE (846)..(846): Xaa can be any naturally occurring amino acid
  SITE (847)..(847): Xaa can be any naturally occurring amino acid
  SITE (848)..(848): Xaa can be any naturally occurring amino acid
  SITE (850)..(850): Xaa can be any naturally occurring amino acid except Pro or Gly
  SITE (852)..(852): Xaa can be any naturally occurring amino acid
  SITE (853)..(853): Xaa can be any naturally occurring amino acid
  SITE (854)..(854): Xaa can be any naturally occurring amino acid
  SITE (856)..(856): Xaa can be any naturally occurring amino acid except Pro or Gly
  SITE (858)..(858): Xaa can be any naturally occurring amino acid
  SITE (859)..(859): Xaa can be any naturally occurring amino acid
  SITE (860)..(860): Xaa can be any naturally occurring amino acid
  SITE (862)..(862): Xaa can be any naturally occurring amino acid except Pro or Gly
  SITE (864)..(864): Xaa can be any naturally occurring amino acid
  SITE (865)..(865): Xaa can be any naturally occurring amino acid
  SITE (866)..(866): Xaa can be any naturally occurring amino acid
  SITE (868)..(868): Xaa can be any naturally occurring amino acid except Pro or Gly
  SITE (870)..(870): Xaa can be any naturally occurring amino acid
  SITE (871)..(871): Xaa can be any naturally occurring amino acid
  SITE (872)..(872): Xaa can be any naturally occurring amino acid
  SITE (874)..(874): Xaa can be any naturally occurring amino acid except Pro or Gly
  SITE (876)..(876): Xaa can be any naturally occurring amino acid
  SITE (877)..(877): Xaa can be any naturally occurring amino acid
  SITE (878)..(878): Xaa can be any naturally occurring amino acid
  SITE (880)..(880): Xaa can be any naturally occurring amino acid except Pro or Gly
  SITE (882)..(882): Xaa can be any naturally occurring amino acid
  SITE (883)..(883): Xaa can be any naturally occurring amino acid
  SITE (884)..(884): Xaa can be any naturally occurring amino acid
  SITE (886)..(886): Xaa can be any naturally occurring amino acid except Pro or Gly
  SITE (888)..(888): Xaa can be any naturally occurring amino acid
  SITE (889)..(889): Xaa can be any naturally occurring amino acid
  SITE (890)..(890): Xaa can be any naturally occurring amino acid
  SITE (892)..(892): Xaa can be any naturally occurring amino acid except Pro or Gly
  SITE (894)..(894): Xaa can be any naturally occurring amino acid
  SITE (895)..(895): Xaa can be any naturally occurring amino acid
  SITE (896)..(896): Xaa can be any naturally occurring amino acid
  SITE (898)..(898): Xaa can be any naturally occurring amino acid except Pro or Gly
  SITE (900)..(900): Xaa can be any naturally occurring amino acid
  SITE (901)..(901): Xaa can be any naturally occurring amino acid
  SITE (902)..(902): Xaa can be any naturally occurring amino acid
  SITE (904)..(904): Xaa can be any naturally occurring amino acid except Pro or Gly
  SITE (906)..(906): Xaa can be any naturally occurring amino acid
  SITE (907)..(907): Xaa can be any naturally occurring amino acid
  SITE (908)..(908): Xaa can be any naturally occurring amino acid
  SITE (910)..(910): Xaa can be any naturally occurring amino acid except Pro or Gly
  SITE (912)..(912): Xaa can be any naturally occurring amino acid
  SITE (913)..(913): Xaa can be any naturally occurring amino acid
  SITE (914)..(914): Xaa can be any naturally occurring amino acid
  SITE (916)..(916): Xaa can be any naturally occurring amino acid except Pro or Gly
  SITE (918)..(918): Xaa can be any naturally occurring amino acid
  SITE (919)..(919): Xaa can be any naturally occurring amino acid
  SITE (920)..(920): Xaa can be any naturally occurring amino acid
  SITE (922)..(922): Xaa can be any naturally occurring amino acid except Pro or Gly
  SITE (924)..(924): Xaa can be any naturally occurring amino acid
  SITE (925)..(925): Xaa can be any naturally occurring amino acid
  SITE (926)..(926): Xaa can be any naturally occurring amino acid
  SITE (928)..(928): Xaa can be any naturally occurring amino acid except Pro or Gly
  SITE (930)..(930): Xaa can be any naturally occurring amino acid
  SITE (931)..(931): Xaa can be any naturally occurring amino acid
  SITE (932)..(932): Xaa can be any naturally occurring amino acid
  SITE (934)..(934): Xaa can be any naturally occurring amino acid except Pro or Gly
  SITE (936)..(936): Xaa can be any naturally occurring amino acid
  SITE (937)..(937): Xaa can be any naturally occurring amino acid
  SITE (938)..(938): Xaa can be any naturally occurring amino acid
  SITE (940)..(940): Xaa can be any naturally occurring amino acid except Pro or Gly
  SITE (942)..(942): Xaa can be any naturally occurring amino acid
  SITE (943)..(943): Xaa can be any naturally occurring amino acid
  SITE (944)..(944): Xaa can be any naturally occurring amino acid
  SITE (946)..(946): Xaa can be any naturally occurring amino acid except Pro or Gly
  SITE (948)..(948): Xaa can be any naturally occurring amino acid
  SITE (949)..(949): Xaa can be any naturally occurring amino acid
  SITE (950)..(950): Xaa can be any naturally occurring amino acid
  SITE (952)..(952): Xaa can be any naturally occurring amino acid except Pro or Gly
  SITE (954)..(954): Xaa can be any naturally occurring amino acid
  SITE (955)..(955): Xaa can be any naturally occurring amino acid
  SITE (956)..(956): Xaa can be any naturally occurring amino acid
  SITE (958)..(958): Xaa can be any naturally occurring amino acid except Pro or Gly
  SITE (960)..(960): Xaa can be any naturally occurring amino acid
XXPXGXXXPXGXXXPXGXXXPXGXXXPXGXXXPXGXXXPXGXXXPXGXXXPXGXXXPXGXXXPXGXXXPXGXXXPXGXXXPXGXXXPXGXXXPXGXXXPXGXXXPXGXXXPXGXXXPXGXXXPXGXXXPXGXXXPXGXXXPXGXXXPXGXXXPXGXXXPXGXXXPXGXXXPXGXXXPXGXXXPXGXXXPXGXXXPXGXXXPXGXXXPXGXXXPXGXXXPXGXXXPXGXXXPXGXXXPXGXXXPXGXXXPXGXXXPXGXXXPXGXXXPXGXXXPXGXXXPXGXXXPXGXXXPXGXXXPXGXXXPXGXXXPXGXXXPXGXXXPXGXXXPXGXXXPXGXXXPXGXXXPXGXXXPXGXXXPXGXXXPXGXXXPXGXXXPXGXXXPXGXXXPXGXXXPXGXXXPXGXXXPXGXXXPXGXXXPXGXXXPXGXXXPXGXXXPXGXXXPXGXXXPXGXXXPXGXXXPXGXXXPXGXXXPXGXXXPXGXXXPXGXXXPXGXXXPXGXXXPXGXXXPXGXXXPXGXXXPXGXXXPXGXXXPXGXXXPXGXXXPXGXXXPXGXXXPXGXXXPXGXXXPXGXXXPXGXXXPXGXXXPXGXXXPXGXXXPXGXXXPXGXXXPXGXXXPXGXXXPXGXXXPXGXXXPXGXXXPXGXXXPXGXXXPXGXXXPXGXXXPXGXXXPXGXXXPXGXXXPXGXXXPXGXXXPXGXXXPXGXXXPXGXXXPXGXXXPXGXXXPXGXXXPXGXXXPXGXXXPXGXXXPXGXXXPXGXXXPXGXXXPXGXXXPXGXXXPXGXXXPXGXXXPXGXXXPXGXXXPXGXXXPXGXXXPXGXXXPXGXXXPXGXXXPXGXXXPXGXXXPXGXXXPXGXXXPXGXXXPXGXXXPXGXXXPXGXXXPXGXXXPXGXXXPXGXXXPXGXXXPXGXXXPXGXXXPXGXXXPXGXXXPXGXXXPXGXXXPXGXXXPXGXXXPXGXXXPXGX

SEQ ID NO: 150 - protein, 1120 aa, Artificial Sequence
  elastin-like polypeptide
  SITE (1)..(1): Xaa can be any naturally occurring amino acid
  SITE (2)..(2): Xaa can be any naturally occurring amino acid
  SITE (4)..(4): Xaa can be any naturally occurring amino acid except Pro or Gly
  SITE (5)..(5): Xaa can be any naturally occurring amino acid except Pro or Gly
  SITE (7)..(7): Xaa can be any naturally occurring amino acid
  SITE (8)..(8): Xaa can be any naturally occurring amino acid
  SITE (9)..(9): Xaa can be any naturally occurring amino acid
  SITE (11)..(11): Xaa can be any naturally occurring amino acid except Pro or Gly
  SITE (12)..(12): Xaa can be any naturally occurring amino acid except Pro or Gly
  SITE (14)..(14): Xaa can be any naturally occurring amino acid
  SITE (15)..(15): Xaa can be any naturally occurring amino acid
  SITE (16)..(16): Xaa can be any naturally occurring amino acid
  SITE (18)..(18): Xaa can be any naturally occurring amino acid except Pro or Gly
  SITE (19)..(19): Xaa can be any naturally occurring amino acid except Pro or Gly
  SITE (21)..(21): Xaa can be any naturally occurring amino acid
  SITE (22)..(22): Xaa can be any naturally occurring amino acid
  SITE (23)..(23): Xaa can be any naturally occurring amino acid
  SITE (25)..(25): Xaa can be any naturally occurring amino acid except Pro or Gly
  SITE (26)..(26): Xaa can be any naturally occurring amino acid except Pro or Gly
  SITE (28)..(28): Xaa can be any naturally occurring amino acid
  SITE (29)..(29): Xaa can be any naturally occurring amino acid
  SITE (30)..(30): Xaa can be any naturally occurring amino acid
  SITE (32)..(32): Xaa can be any naturally occurring amino acid except Pro or Gly
  SITE (33)..(33): Xaa can be any naturally occurring amino acid except Pro or Gly
  SITE (35)..(35): Xaa can be any naturally occurring amino acid
  SITE (36)..(36): Xaa can be any naturally occurring amino acid
  SITE (37)..(37): Xaa can be any naturally occurring amino acid
  SITE (39)..(39): Xaa can be any naturally occurring amino acid except Pro or Gly
  SITE (40)..(40): Xaa can be any naturally occurring amino acid except Pro or Gly
  SITE (42)..(42): Xaa can be any naturally occurring amino acid
  SITE (43)..(43): Xaa can be any naturally occurring amino acid
  SITE (44)..(44): Xaa can be any naturally occurring amino acid
  SITE (46)..(46): Xaa can be any naturally occurring amino acid except Pro or Gly
  SITE (47)..(47): Xaa can be any naturally occurring amino acid except Pro or Gly
  SITE (49)..(49): Xaa can be any naturally occurring amino acid
  SITE (50)..(50): Xaa can be any naturally occurring amino acid
  SITE (51)..(51): Xaa can be any naturally occurring amino acid
  SITE (53)..(53): Xaa can be any naturally occurring amino acid except Pro or Gly
  SITE (54)..(54): Xaa can be any naturally occurring amino acid except Pro or Gly
  SITE (56)..(56): Xaa can be any naturally occurring amino acid
  SITE (57)..(57): Xaa can be any naturally occurring amino acid
  SITE (58)..(58): Xaa can be any naturally occurring amino acid
  SITE (60)..(60): Xaa can be any naturally occurring amino acid except Pro or Gly
  SITE (61)..(61): Xaa can be any naturally occurring amino acid except Pro or Gly
  SITE (63)..(63): Xaa can be any naturally occurring amino acid
  SITE (64)..(64): Xaa can be any naturally occurring amino acid
  SITE (65)..(65): Xaa can be any naturally occurring amino acid
  SITE (67)..(67): Xaa can be any naturally occurring amino acid except Pro or Gly
  SITE (68)..(68): Xaa can be any naturally occurring amino acid except Pro or Gly
  SITE (70)..(70): Xaa can be any naturally occurring amino acid
  SITE (71)..(1120): May be present or absent in groups of the repeat unit Xaa Xaa Pro Xaa Xaa Gly Xaa
  SITE (71)..(71): Xaa can be any naturally occurring amino acid
  SITE (72)..(72): Xaa can be any naturally occurring amino acid
  SITE (74)..(74): Xaa can be any naturally occurring amino acid except Pro or Gly
  SITE (75)..(75): Xaa can be any naturally occurring amino acid except Pro or Gly
  SITE (77)..(77): Xaa can be any naturally occurring amino acid
  SITE (78)..(78): Xaa can be any naturally occurring amino acid
  SITE (79)..(79): Xaa can be any naturally occurring amino acid
  SITE (81)..(81): Xaa can be any naturally occurring amino acid except Pro or Gly
  SITE (82)..(82): Xaa can be any naturally occurring amino acid except Pro or Gly
  SITE (84)..(84): Xaa can be any naturally occurring amino acid
  SITE (85)..(85): Xaa can be any naturally occurring amino acid
  SITE (86)..(86): Xaa can be any naturally occurring amino acid
  SITE (88)..(88): Xaa can be any naturally occurring amino acid except Pro or Gly
  SITE (89)..(89): Xaa can be any naturally occurring amino acid except Pro or Gly
  SITE (91)..(91): Xaa can be any naturally occurring amino acid
  SITE (92)..(92): Xaa can be any naturally occurring amino acid
  SITE (93)..(93): Xaa can be any naturally occurring amino acid
  SITE (95)..(95): Xaa can be any naturally occurring amino acid except Pro or Gly
  SITE (96)..(96): Xaa can be any naturally occurring amino acid except Pro or Gly
  SITE (98)..(98): Xaa can be any naturally occurring amino acid
  SITE (99)..(99): Xaa can be any naturally occurring amino acid
  SITE (100)..(100): Xaa can be any naturally occurring amino acid
  SITE (102)..(102): Xaa can be any naturally occurring amino acid except Pro or Gly
  SITE (103)..(103): Xaa can be any naturally occurring amino acid except Pro or Gly
  SITE (105)..(105): Xaa can be any naturally occurring amino acid
  SITE (106)..(106): Xaa can be any naturally occurring amino acid
  SITE (107)..(107): Xaa can be any naturally occurring amino acid
  SITE (109)..(109): Xaa can be any naturally occurring amino acid except Pro or Gly
  SITE (110)..(110): Xaa can be any naturally occurring amino acid except Pro or Gly
  SITE (112)..(112): Xaa can be any naturally occurring amino acid
  SITE (113)..(113): Xaa can be any naturally occurring amino acid
  SITE (114)..(114): Xaa can be any naturally occurring amino acid
  SITE (116)..(116): Xaa can be any naturally occurring amino acid except Pro or Gly
  SITE (117)..(117): Xaa can be any naturally occurring amino acid except Pro or Gly
  SITE (119)..(119): Xaa can be any naturally occurring amino acid
  SITE (120)..(120): Xaa can be any naturally occurring amino acid
  SITE (121)..(121): Xaa can be any naturally occurring amino acid
  SITE (123)..(123): Xaa can be any naturally occurring amino acid except Pro or Gly
  SITE (124)..(124): Xaa can be any naturally occurring amino acid except Pro or Gly
  SITE (126)..(126): Xaa can be any naturally occurring amino acid
  SITE (127)..(127): Xaa can be any naturally occurring amino acid
  SITE (128)..(128): Xaa can be any naturally occurring amino acid
  SITE (130)..(130): Xaa can be any naturally occurring amino acid except Pro or Gly
  SITE (131)..(131): Xaa can be any naturally occurring amino acid except Pro or Gly
  SITE (133)..(133): Xaa can be any naturally occurring amino acid
  SITE (134)..(134): Xaa can be any naturally occurring amino acid
  SITE (135)..(135): Xaa can be any naturally occurring amino acid
  SITE (137)..(137): Xaa can be any naturally occurring amino acid except Pro or Gly
  SITE (138)..(138): Xaa can be any naturally occurring amino acid except Pro or Gly
  SITE (140)..(140): Xaa can be any naturally occurring amino acid
  SITE (141)..(141): Xaa can be any naturally occurring amino acid
  SITE (142)..(142): Xaa can be any naturally occurring amino acid
  SITE (144)..(144): Xaa can be any naturally occurring amino acid except Pro or Gly
  SITE (145)..(145): Xaa can be any naturally occurring amino acid except Pro or Gly
  SITE (147)..(147): Xaa can be any naturally occurring amino acid
  SITE (148)..(148): Xaa can be any naturally occurring amino acid
  SITE (149)..(149): Xaa can be any naturally occurring amino acid
  SITE (151)..(151): Xaa can be any naturally occurring amino acid except Pro or Gly
  SITE (152)..(152): Xaa can be any naturally occurring amino acid except Pro or Gly
  SITE (154)..(154): Xaa can be any naturally occurring amino acid
  SITE (155)..(155): Xaa can be any naturally occurring amino acid
  SITE (156)..(156): Xaa can be any naturally occurring amino acid
  SITE (158)..(158): Xaa can be any naturally occurring amino acid except Pro or Gly
  SITE (159)..(159): Xaa can be any naturally occurring amino acid except Pro or Gly
  SITE (161)..(161): Xaa can be any naturally occurring amino acid
  SITE (162)..(162): Xaa can be any naturally occurring amino acid
  SITE (163)..(163): Xaa can be any naturally occurring amino acid
  SITE (165)..(165): Xaa can be any naturally occurring amino acid except Pro or Gly
  SITE (166)..(166): Xaa can be any naturally occurring amino acid except Pro or Gly
  SITE (168)..(168): Xaa can be any naturally occurring amino acid
  SITE (169)..(169): Xaa can be any naturally occurring amino acid
  SITE (170)..(170): Xaa can be any naturally occurring amino acid
  SITE (172)..(172): Xaa can be any naturally occurring amino acid except Pro or Gly
  SITE (173)..(173): Xaa can be any naturally occurring amino acid except Pro or Gly
  SITE (175)..(175): Xaa can be any naturally occurring amino acid
  SITE (176)..(176): Xaa can be any naturally occurring amino acid
  SITE (177)..(177): Xaa can be any naturally occurring amino acid
  SITE (179)..(179): Xaa can be any naturally occurring amino acid except Pro or Gly
  SITE (180)..(180): Xaa can be any naturally occurring amino acid except Pro or Gly
  SITE (182)..(182): Xaa can be any naturally occurring amino acid
  SITE (183)..(183): Xaa can be any naturally occurring amino acid
  SITE (184)..(184): Xaa can be any naturally occurring amino acid
  SITE (186)..(186): Xaa can be any naturally occurring amino acid except Pro or Gly
  SITE (187)..(187): Xaa can be any naturally occurring amino acid except Pro or Gly
  SITE (189)..(189): Xaa can be any naturally occurring amino acid
  SITE (190)..(190): Xaa can be any naturally occurring amino acid
  SITE (191)..(191): Xaa can be any naturally occurring amino acid
  SITE (193)..(193): Xaa can be any naturally occurring amino acid except Pro or Gly
  SITE (194)..(194): Xaa can be any naturally occurring amino acid except Pro or Gly
  SITE (196)..(196): Xaa can be any naturally occurring amino acid
  SITE (197)..(197): Xaa can be any naturally occurring amino acid
  SITE (198)..(198): Xaa can be any naturally occurring amino acid
  SITE (200)..(200): Xaa can be any naturally occurring amino acid except Pro or Gly
  SITE (201)..(201): Xaa can be any naturally occurring amino acid except Pro or Gly
  SITE (203)..(203): Xaa can be any naturally occurring amino acid
  SITE (204)..(204): Xaa can be any naturally occurring amino acid
  SITE (205)..(205): Xaa can be any naturally occurring amino acid
  SITE (207)..(207): Xaa can be any naturally occurring amino acid except Pro or Gly
  SITE (208)..(208): Xaa can be any naturally occurring amino acid except Pro or Gly
  SITE (210)..(210): Xaa can be any naturally occurring amino acid
  SITE (211)..(211): Xaa can be any naturally occurring amino acid
  SITE (212)..(212): Xaa can be any naturally occurring amino acid
  SITE (214)..(214): Xaa can be any naturally occurring amino acid except Pro or Gly
  SITE (215)..(215): Xaa can be any naturally occurring amino acid except Pro or Gly
  SITE (217)..(217): Xaa can be any naturally occurring amino acid
  SITE (218)..(218): Xaa can be any naturally occurring amino acid
  SITE (219)..(219): Xaa can be any naturally occurring amino acid
  SITE (221)..(221): Xaa can be any naturally occurring amino acid except Pro or Gly
  SITE (222)..(222): Xaa can be any naturally occurring amino acid except Pro or Gly
  SITE (224)..(224): Xaa can be any naturally occurring amino acid
  SITE (225)..(225): Xaa can be any naturally occurring amino acid
  SITE (226)..(226): Xaa can be any naturally occurring amino acid
  SITE (228)..(228): Xaa can be any naturally occurring amino acid except Pro or Gly
  SITE (229)..(229): Xaa can be any naturally occurring amino acid except Pro or Gly
  SITE (231)..(231): Xaa can be any naturally occurring amino acid
  SITE (232)..(232): Xaa can be any naturally occurring amino acid
  SITE (233)..(233): Xaa can be any naturally occurring amino acid
  SITE (235)..(235): Xaa can be any naturally occurring amino acid except Pro or Gly
  SITE (236)..(236): Xaa can be any naturally occurring amino acid except Pro or Gly
  SITE (238)..(238): Xaa can be any naturally occurring amino acid
  SITE (239)..(239): Xaa can be any naturally occurring amino acid
  SITE (240)..(240): Xaa can be any naturally occurring amino acid
  SITE (242)..(242): Xaa can be any naturally occurring amino acid except Pro or Gly
  SITE (243)..(243): Xaa can be any naturally occurring amino acid except Pro or Gly
  SITE (245)..(245): Xaa can be any naturally occurring amino acid
  SITE (246)..(246): Xaa can be any naturally occurring amino acid
  SITE (247)..(247): Xaa can be any naturally occurring amino acid
  SITE (249)..(249): Xaa can be any naturally occurring amino acid except Pro or Gly
  SITE (250)..(250): Xaa can be any naturally occurring amino acid except Pro or Gly
  SITE (252)..(252): Xaa can be any naturally occurring amino acid
  SITE (253)..(253): Xaa can be any naturally occurring amino acid
  SITE (254)..(254): Xaa can be any naturally occurring amino acid
  SITE (256)..(256): Xaa can be any naturally occurring amino acid except Pro or Gly
  SITE (257)..(257): Xaa can be any naturally occurring amino acid except Pro or Gly
  SITE (259)..(259): Xaa can be any naturally occurring amino acid
  SITE (260)..(260): Xaa can be any naturally occurring amino acid
  SITE (261)..(261): Xaa can be any naturally occurring amino acid
  SITE (263)..(263): Xaa can be any naturally occurring amino acid except Pro or Gly
  SITE (264)..(264): Xaa can be any naturally occurring amino acid except Pro or Gly
  SITE (266)..(266): Xaa can be any naturally occurring amino acid
  SITE (267)..(267): Xaa can be any naturally occurring amino acid
  SITE (268)..(268): Xaa can be any naturally occurring amino acid
  SITE (270)..(270): Xaa can be any naturally occurring amino acid except Pro or Gly
  SITE (271)..(271): Xaa can be any naturally occurring amino acid except Pro or Gly
  SITE (273)..(273): Xaa can be any naturally occurring amino acid
  SITE (274)..(274): Xaa can be any naturally occurring amino acid
  SITE (275)..(275): Xaa can be any naturally occurring amino acid
  SITE (277)..(277): Xaa can be any naturally occurring amino acid except Pro or Gly
  SITE (278)..(278): Xaa can be any naturally occurring amino acid except Pro or Gly
  SITE (280)..(280): Xaa can be any naturally occurring amino acid
  SITE (281)..(281): Xaa can be any naturally occurring amino acid
  SITE (282)..(282): Xaa can be any naturally occurring amino acid
  SITE (284)..(284): Xaa can be any naturally occurring amino acid except Pro or Gly
  SITE (285)..(285): Xaa can be any naturally occurring amino acid except Pro or Gly
  SITE (287)..(287): Xaa can be any naturally occurring amino acid
  SITE (288)..(288): Xaa can be any naturally occurring amino acid
  SITE (289)..(289): Xaa can be any naturally occurring amino acid
  SITE (291)..(291): Xaa can be any naturally occurring amino acid except Pro or Gly
  SITE (292)..(292): Xaa can be any naturally occurring amino acid except Pro or Gly
  SITE (294)..(294): Xaa can be any naturally occurring amino acid
  SITE (295)..(295): Xaa can be any naturally occurring amino acid
  SITE (296)..(296): Xaa can be any naturally occurring amino acid
  SITE (298)..(298): Xaa can be any naturally occurring amino acid except Pro or Gly
  SITE (299)..(299): Xaa can be any naturally occurring amino acid except Pro or Gly
  SITE (301)..(301): Xaa can be any naturally occurring amino acid
  SITE (302)..(302): Xaa can be any naturally occurring amino acid
  SITE (303)..(303): Xaa can be any naturally occurring amino acid
  SITE (305)..(305): Xaa can be any naturally occurring amino acid except Pro or Gly
  SITE (306)..(306): Xaa can be any naturally occurring amino acid except Pro or Gly
  SITE (308)..(308): Xaa can be any naturally occurring amino acid
  SITE (309)..(309): Xaa can be any naturally occurring amino acid
  SITE (310)..(310): Xaa can be any naturally occurring amino acid
  SITE (312)..(312): Xaa can be any naturally occurring amino acid except Pro or Gly
  SITE (313)..(313): Xaa can be any naturally occurring amino acid except Pro or Gly
  SITE (315)..(315): Xaa can be any naturally occurring amino acid
  SITE (316)..(316): Xaa can be any naturally occurring amino acid
  SITE (317)..(317): Xaa can be any naturally occurring amino acid
  SITE (319)..(319): Xaa can be any naturally occurring amino acid except Pro or Gly
  SITE (320)..(320): Xaa can be any naturally occurring amino acid except Pro or Gly
  SITE (322)..(322): Xaa can be any naturally occurring amino acid
  SITE (323)..(323): Xaa can be any naturally occurring amino acid
  SITE (324)..(324): Xaa can be any naturally occurring amino acid
  SITE (326)..(326): Xaa can be any naturally occurring amino acid except Pro or Gly
  SITE (327)..(327): Xaa can be any naturally occurring amino acid except Pro or Gly
  SITE (329)..(329): Xaa can be any naturally occurring amino acid
  SITE (330)..(330): Xaa can be any naturally occurring amino acid
  SITE (331)..(331): Xaa can be any naturally occurring amino acid
  SITE (333)..(333): Xaa can be any naturally occurring amino acid except Pro or Gly
  SITE (334)..(334): Xaa can be any naturally occurring amino acid except Pro or Gly
  SITE (336)..(336): Xaa can be any naturally occurring amino acid
  SITE (337)..(337): Xaa can be any naturally occurring amino acid
  SITE (338)..(338): Xaa can be any naturally occurring amino acid
  SITE (340)..(340): Xaa can be any naturally occurring amino acid except Pro or Gly
  SITE (341)..(341): Xaa can be any naturally occurring amino acid except Pro or Gly
  SITE (343)..(343): Xaa can be any naturally occurring amino acid
  SITE (344)..(344): Xaa can be any naturally occurring amino acid
  SITE (345)..(345): Xaa can be any naturally occurring amino acid
  SITE (347)..(347): Xaa can be any naturally occurring amino acid except Pro or Gly
  SITE (348)..(348): Xaa can be any naturally occurring amino acid except Pro or Gly
  SITE (350)..(350): Xaa can be any naturally occurring amino acid
  SITE (351)..(351): Xaa can be any naturally occurring amino acid
  SITE (352)..(352): Xaa can be any naturally occurring amino acid
  SITE (354)..(354): Xaa can be any naturally occurring amino acid except Pro or Gly
  SITE (355)..(355): Xaa can be any naturally occurring amino acid except Pro or Gly
  SITE (357)..(357): Xaa can be any naturally occurring amino acid
  SITE (358)..(358): Xaa can be any naturally occurring amino acid
  SITE (359)..(359): Xaa can be any naturally occurring amino acid
  SITE (361)..(361): Xaa can be any naturally occurring amino acid except Pro or Gly
  SITE (362)..(362): Xaa can be any naturally occurring amino acid except Pro or Gly
  SITE (364)..(364): Xaa can be any naturally occurring amino acid
  SITE (365)..(365): Xaa can be any naturally occurring amino acid
  SITE (366)..(366): Xaa can be any naturally occurring amino acid
  SITE (368)..(368): Xaa can be any naturally occurring amino acid except Pro or Gly
  SITE (369)..(369): Xaa can be any naturally occurring amino acid except Pro or Gly
  SITE (371)..(371): Xaa can be any naturally occurring amino acid
  SITE (372)..(372): Xaa can be any naturally occurring amino acid
  SITE (373)..(373): Xaa can be any naturally occurring amino acid
  SITE (375)..(375): Xaa can be any naturally occurring amino acid except Pro or Gly
  SITE (376)..(376): Xaa can be any naturally occurring amino acid except Pro or Gly
  SITE (378)..(378): Xaa can be any naturally occurring amino acid
  SITE (379)..(379): Xaa can be any naturally occurring amino acid
  SITE (380)..(380): Xaa can be any naturally occurring amino acid
  SITE (382)..(382): Xaa can be any naturally occurring amino acid except Pro or Gly
  SITE (383)..(383): Xaa can be any naturally occurring amino acid except Pro or Gly
  SITE (385)..(385): Xaa can be any naturally occurring amino acid
  SITE (386)..(386): Xaa can be any naturally occurring amino acid
  SITE (387)..(387): Xaa can be any naturally occurring amino acid
  SITE (389)..(389): Xaa can be any naturally occurring amino acid except Pro or Gly
  SITE (390)..(390): Xaa can be any naturally occurring amino acid except Pro or Gly
  SITE (392)..(392): Xaa can be any naturally occurring amino acid
  SITE (393)..(393): Xaa can be any naturally occurring amino acid
  SITE (394)..(394): Xaa can be any naturally occurring amino acid
  SITE (396)..(396): Xaa can be any naturally occurring amino acid except Pro or Gly
  SITE (397)..(397): Xaa can be any naturally occurring amino acid except Pro or Gly
  SITE (399)..(399): Xaa can be any naturally occurring amino acid
  SITE (400)..(400): Xaa can be any naturally occurring amino acid
  SITE (401)..(401): Xaa can be any naturally occurring amino acid
  SITE (403)..(403): Xaa can be any naturally occurring amino acid except Pro or Gly
  SITE (404)..(404): Xaa can be any naturally occurring amino acid except Pro or Gly
  SITE (406)..(406): Xaa can be any naturally occurring amino acid
  SITE (407)..(407): Xaa can be any naturally occurring amino acid
  SITE (408)..(408): Xaa can be any naturally occurring amino acid
  SITE (410)..(410): Xaa can be any naturally occurring amino acid except Pro or Gly
  SITE (411)..(411): Xaa can be any naturally occurring amino acid except Pro or Gly
  SITE (413)..(413): Xaa can be any naturally occurring amino acid
  SITE (414)..(414): Xaa can be any naturally occurring amino acid
  SITE (415)..(415): Xaa can be any naturally occurring amino acid
  SITE (417)..(417): Xaa can be any naturally occurring amino acid except Pro or Gly
  SITE (418)..(418): Xaa can be any naturally occurring amino acid except Pro or Gly
  SITE (420)..(420): Xaa can be any naturally occurring amino acid
  SITE (421)..(421): Xaa can be any naturally occurring amino acid
  SITE (422)..(422): Xaa can be any naturally occurring amino acid
  SITE (424)..(424): Xaa can be any naturally occurring amino acid except Pro or Gly
  SITE (425)..(425): Xaa can be any naturally occurring amino acid except Pro or Gly
  SITE (427)..(427): Xaa can be any naturally occurring amino acid
  SITE (428)..(428): Xaa can be any naturally occurring amino acid
  SITE (429)..(429): Xaa can be any naturally occurring amino acid
  SITE (431)..(431): Xaa can be any naturally occurring amino acid except Pro or Gly
  SITE (432)..(432): Xaa can be any naturally occurring amino acid except Pro or Gly
  SITE (434)..(434): Xaa can be any naturally occurring amino acid
  SITE (435)..(435): Xaa can be any naturally occurring amino acid
  SITE (436)..(436): Xaa can be any naturally occurring amino acid
  SITE (438)..(438): Xaa can be any naturally occurring amino acid except Pro or Gly
  SITE (439)..(439): Xaa can be any naturally occurring amino acid except Pro or Gly
  SITE (441)..(441): Xaa can be any naturally occurring amino acid
  SITE (442)..(442): Xaa can be any naturally occurring amino acid
  SITE (443)..(443): Xaa can be any naturally occurring amino acid
  SITE (445)..(445): Xaa can be any naturally occurring amino acid except Pro or Gly
  SITE (446)..(446): Xaa can be any naturally occurring amino acid except Pro or Gly
  SITE (448)..(448): Xaa can be any naturally occurring amino acid
  SITE (449)..(449): Xaa can be any naturally occurring amino acid
  SITE (450)..(450): Xaa can be any naturally occurring amino acid
  SITE (452)..(452): Xaa can be any naturally occurring amino acid except Pro or Gly
  SITE (453)..(453): Xaa can be any naturally occurring amino acid except Pro or Gly
  SITE (455)..(455): Xaa can be any naturally occurring amino acid
  SITE (456)..(456): Xaa can be any naturally occurring amino acid
  SITE (457)..(457): Xaa can be any naturally occurring amino acid
  SITE (459)..(459): Xaa can be any naturally occurring amino acid except Pro or Gly
  SITE (460)..(460): Xaa can be any naturally occurring amino acid except Pro or Gly
  SITE (462)..(462): Xaa can be any naturally occurring amino acid
  SITE (463)..(463): Xaa can be any naturally occurring amino acid
  SITE (464)..(464): Xaa can be any naturally occurring amino acid
  SITE (466)..(466): Xaa can be any naturally occurring amino acid except Pro or Gly
  SITE (467)..(467): Xaa can be any naturally occurring amino acid except Pro or Gly
  SITE (469)..(469): Xaa can be any naturally occurring amino acid
  SITE (470)..(470): Xaa can be any naturally occurring amino acid
  SITE (471)..(471): Xaa can be any naturally occurring amino acid
  SITE (473)..(473): Xaa can be any naturally occurring amino acid except Pro or Gly
  SITE (474)..(474): Xaa can be any naturally occurring amino acid except Pro or Gly
  SITE (476)..(476): Xaa can be any naturally occurring amino acid
  SITE (477)..(477): Xaa can be any naturally occurring amino acid
  SITE (478)..(478): Xaa can be any naturally occurring amino acid
  SITE (480)..(480): Xaa can be any naturally occurring amino acid except Pro or Gly
  SITE (481)..(481): Xaa can be any naturally occurring amino acid except Pro or Gly
  SITE (483)..(483): Xaa can be any naturally occurring amino acid
  SITE (484)..(484): Xaa can be any naturally occurring amino acid
  SITE (485)..(485): Xaa can be any naturally occurring amino acid
  SITE (487)..(487): Xaa can be any naturally occurring amino acid except Pro or Gly
  SITE (488)..(488): Xaa can be any naturally occurring amino acid except Pro or Gly
  SITE (490)..(490): Xaa can be any naturally occurring amino acid
  SITE (491)..(491): Xaa can be any naturally occurring amino acid
  SITE (492)..(492): Xaa can be any naturally occurring amino acid
  SITE (494)..(494): Xaa can be any naturally occurring amino acid except Pro or Gly
  SITE (495)..(495): Xaa can be any naturally occurring amino acid except Pro or Gly
  SITE (497)..(497): Xaa can be any naturally occurring amino acid
  SITE (498)..(498): Xaa can be any naturally occurring amino acid
  SITE (499)..(499): Xaa can be any naturally occurring amino acid
  SITE (501)..(501): Xaa can be any naturally occurring amino acid except Pro or Gly
  SITE (502)..(502): Xaa can be any naturally occurring amino acid except Pro or Gly
  SITE (504)..(504): Xaa can be any naturally occurring amino acid
  SITE (505)..(505): Xaa can be any naturally occurring amino acid
  SITE (506)..(506): Xaa can be any naturally occurring amino acid
  SITE (508)..(508): Xaa can be any naturally occurring amino acid except Pro or Gly
  SITE (509)..(509): Xaa can be any naturally occurring amino acid except Pro or Gly
  SITE (511)..(511): Xaa can be any naturally occurring amino acid
  SITE (512)..(512): Xaa can be any naturally occurring amino acid
  SITE (513)..(513): Xaa can be any naturally occurring amino acid
  SITE (515)..(515): Xaa can be any naturally occurring amino acid except Pro or Gly
  SITE (516)..(516): Xaa can be any naturally occurring amino acid except Pro or Gly
  SITE (518)..(518): Xaa can be any naturally occurring amino acid
  SITE (519)..(519): Xaa can be any naturally occurring amino acid
  SITE (520)..(520): Xaa can be any naturally occurring amino acid
  SITE (522)..(522): Xaa can be any naturally occurring amino acid except Pro or Gly
  SITE (523)..(523): Xaa can be any naturally occurring amino acid except Pro or Gly
  SITE (525)..(525): Xaa can be any naturally occurring amino acid
  SITE (526)..(526): Xaa can be any naturally occurring amino acid
  SITE (527)..(527): Xaa can be any naturally occurring amino acid
  SITE (529)..(529): Xaa can be any naturally occurring amino acid except Pro or Gly
  SITE (530)..(530): Xaa can be any naturally occurring amino acid except Pro or Gly
  SITE (532)..(532): Xaa can be any naturally occurring amino acid
  SITE (533)..(533): Xaa can be any naturally occurring amino acid
  SITE (534)..(534): Xaa can be any naturally occurring amino acid
  SITE (536)..(536): Xaa can be any naturally occurring amino acid except Pro or Gly
  SITE (537)..(537): Xaa can be any naturally occurring amino acid except Pro or Gly
  SITE (539)..(539): Xaa can be any naturally occurring amino acid
  SITE (540)..(540): Xaa can be any naturally occurring amino acid
  SITE (541)..(541): Xaa can be any naturally occurring amino acid
  SITE (543)..(543): Xaa can be any naturally occurring amino acid except Pro or Gly
  SITE (544)..(544): Xaa can be any naturally occurring amino acid except Pro or Gly
  SITE (546)..(546): Xaa can be any naturally occurring amino acid
  SITE (547)..(547): Xaa can be any naturally occurring amino acid
  SITE (548)..(548): Xaa can be any naturally occurring amino acid
  SITE (550)..(550): Xaa can be any naturally occurring amino acid except Pro or Gly
  SITE (551)..(551): Xaa can be any naturally occurring amino acid except Pro or Gly
  SITE (553)..(553): Xaa can be any naturally occurring amino acid
  SITE (554)..(554): Xaa can be any naturally occurring amino acid
  SITE (555)..(555): Xaa can be any naturally occurring amino acid
  SITE (557)..(557): Xaa can be any naturally occurring amino acid except Pro or Gly
  SITE (558)..(558): Xaa can be any naturally occurring amino acid except Pro or Gly
  SITE (560)..(560): Xaa can be any naturally occurring amino acid
  SITE (561)..(561): Xaa can be any naturally occurring amino acid
  SITE (562)..(562): Xaa can be any naturally occurring amino acid
  SITE (564)..(564): Xaa can be any naturally occurring amino acid except Pro or Gly
  SITE (565)..(565): Xaa can be any naturally occurring amino acid except Pro or Gly
  SITE (567)..(567): Xaa can be any naturally occurring amino acid
  SITE (568)..(568): Xaa can be any naturally occurring amino acid
  SITE (569)..(569): Xaa can be any naturally occurring amino acid
  SITE (571)..(571): Xaa can be any naturally occurring amino acid except Pro or Gly
  SITE (572)..(572): Xaa can be any naturally occurring amino acid except Pro or Gly
  SITE (574)..(574): Xaa can be any naturally occurring amino acid
  SITE (575)..(575): Xaa can be any naturally occurring amino acid
  SITE (576)..(576): Xaa can be any naturally occurring amino acid
  SITE (578)..(578): Xaa can be any naturally occurring amino acid except Pro or Gly
  SITE (579)..(579): Xaa can be any naturally occurring amino acid except Pro or Gly
  SITE (581)..(581): Xaa can be any naturally occurring amino acid
  SITE (582)..(582): Xaa can be any naturally occurring amino acid
  SITE (583)..(583): Xaa can be any naturally occurring amino acid
  SITE (585)..(585): Xaa can be any naturally occurring amino acid except Pro or Gly
  SITE (586)..(586): Xaa can be any naturally occurring amino acid except Pro or Gly
  SITE (588)..(588): Xaa can be any naturally occurring amino acid
  SITE (589)..(589): Xaa can be any naturally occurring amino acid
  SITE (590)..(590): Xaa can be any naturally occurring amino acid
  SITE (592)..(592): Xaa can be any naturally occurring amino acid except Pro or Gly
  SITE (593)..(593): Xaa can be any naturally occurring amino acid except Pro or Gly
  SITE (595)..(595): Xaa can be any naturally occurring amino acid
  SITE (596)..(596): Xaa can be any naturally occurring amino acid
  SITE (597)..(597): Xaa can be any naturally occurring amino acid
  SITE (599)..(599): Xaa can be any naturally occurring amino acid except Pro or Gly
  SITE (600)..(600): Xaa can be any naturally occurring amino acid except Pro or Gly
  SITE (602)..(602): Xaa can be any naturally occurring amino acid
  SITE (603)..(603): Xaa can be any naturally occurring amino acid
  SITE (604)..(604): Xaa can be any naturally occurring amino acid
  SITE (606)..(606): Xaa can be any naturally occurring amino acid except Pro or Gly
  SITE (607)..(607): Xaa can be any naturally occurring amino acid except Pro or Gly
  SITE (609)..(609): Xaa can be any naturally occurring amino acid
  SITE (610)..(610): Xaa can be any naturally occurring amino acid
  SITE (611)..(611): Xaa can be any naturally occurring amino acid
  SITE (613)..(613): Xaa can be any naturally occurring amino acid except Pro or Gly
  SITE (614)..(614): Xaa can be any naturally occurring amino acid except Pro or Gly
  SITE (616)..(616): Xaa can be any naturally occurring amino acid
  SITE (617)..(617): Xaa can be any naturally occurring amino acid
  SITE (618)..(618): Xaa can be any naturally occurring amino acid
  SITE (620)..(620): Xaa can be any naturally occurring amino acid except Pro or Gly
  SITE (621)..(621): Xaa can be any naturally occurring amino acid except Pro or Gly
  SITE (623)..(623): Xaa can be any naturally occurring amino acid
  SITE (624)..(624): Xaa can be any naturally occurring amino acid
  SITE (625)..(625): Xaa can be any naturally occurring amino acid
  SITE (627)..(627): Xaa can be any naturally occurring amino acid except Pro or Gly
  SITE (628)..(628): Xaa can be any naturally occurring amino acid except Pro or Gly
  SITE (630)..(630): Xaa can be any naturally occurring amino acid
  SITE (631)..(631): Xaa can be any naturally occurring amino acid
  SITE (632)..(632): Xaa can be any naturally occurring amino acid
  SITE (634)..(634): Xaa can be any naturally occurring amino acid except Pro or Gly
  SITE (635)..(635): Xaa can be any naturally occurring amino acid except Pro or Gly
  SITE (637)..(637): Xaa can be any naturally occurring amino acid
  SITE (638)..(638): Xaa can be any naturally occurring amino acid
  SITE (639)..(639): Xaa can be any naturally occurring amino acid
  SITE (641)..(641): Xaa can be any naturally occurring amino acid except Pro or Gly
  SITE (642)..(642): Xaa can be any naturally occurring amino acid except Pro or Gly
  SITE (644)..(644): Xaa can be any naturally occurring amino acid
  SITE (645)..(645): Xaa can be any naturally occurring amino acid
  SITE (646)..(646): Xaa can be any naturally occurring amino acid
  SITE (648)..(648): Xaa can be any naturally occurring amino acid except Pro or Gly
  SITE (649)..(649): Xaa can be any naturally occurring amino acid except Pro or Gly
  SITE (651)..(651): Xaa can be any naturally occurring amino acid
  SITE (652)..(652): Xaa can be any naturally occurring amino acid
  SITE (653)..(653): Xaa can be any naturally occurring amino acid
  SITE (655)..(655): Xaa can be any naturally occurring amino acid except Pro or Gly
  SITE (656)..(656): Xaa can be any naturally occurring amino acid except Pro or Gly
  SITE (658)..(658): Xaa can be any naturally occurring amino acid
  SITE (659)..(659): Xaa can be any naturally occurring amino acid
  SITE (660)..(660): Xaa can be any naturally occurring amino acid
  SITE (662)..(662): Xaa can be any naturally occurring amino acid except Pro or Gly
  SITE (663)..(663): Xaa can be any naturally occurring amino acid except Pro or Gly
  SITE (665)..(665): Xaa can be any naturally occurring amino acid
  SITE (666)..(666): Xaa can be any naturally occurring amino acid
  SITE (667)..(667): Xaa can be any naturally occurring amino acid
  SITE (669)..(669): Xaa can be any naturally occurring amino acid except Pro or Gly
  SITE (670)..(670): Xaa can be any naturally occurring amino acid except Pro or Gly
  SITE (672)..(672): Xaa can be any naturally occurring amino acid
  SITE (673)..(673): Xaa can be any naturally occurring amino acid
  SITE (674)..(674): Xaa can be any naturally occurring amino acid
  SITE (676)..(676): Xaa can be any naturally occurring amino acid except Pro or Gly
  SITE (677)..(677): Xaa can be any naturally occurring amino acid except Pro or Gly
  SITE (679)..(679): Xaa can be any naturally occurring amino acid
  SITE (680)..(680): Xaa can be any naturally occurring amino acid
  SITE (681)..(681): Xaa can be any naturally occurring amino acid
  SITE (683)..(683): Xaa can be any naturally occurring amino acid except Pro or Gly
  SITE (684)..(684): Xaa can be any naturally occurring amino acid except Pro or Gly
  SITE (686)..(686): Xaa can be any naturally occurring amino acid
  SITE (687)..(687): Xaa can be any naturally occurring amino acid
  SITE (688)..(688): Xaa can be any naturally occurring amino acid
  SITE (690)..(690): Xaa can be any naturally occurring amino acid except Pro or Gly
  SITE (691)..(691): Xaa can be any naturally occurring amino acid except Pro or Gly
  SITE (693)..(693): Xaa can be any naturally occurring amino acid
  SITE (694)..(694): Xaa can be any naturally occurring amino acid
  SITE (695)..(695): Xaa can be any naturally occurring amino acid
  SITE (697)..(697): Xaa can be any naturally occurring amino acid except Pro or Gly
  SITE (698)..(698): Xaa can be any naturally occurring amino acid except Pro or Gly
  SITE (700)..(700): Xaa can be any naturally occurring amino acid
  SITE (701)..(701): Xaa can be any naturally occurring amino acid
  SITE (702)..(702): Xaa can be any naturally occurring amino acid
  SITE (704)..(704): Xaa can be any naturally occurring amino acid except Pro or Gly
  SITE (705)..(705): Xaa can be any naturally occurring amino acid except Pro or Gly
  SITE (707)..(707): Xaa can be any naturally occurring amino acid
  SITE (708)..(708): Xaa can be any naturally occurring amino acid
  SITE (709)..(709): Xaa can be any naturally occurring amino acid
  SITE (711)..(711): Xaa can be any naturally occurring amino acid except Pro or Gly
  SITE (712)..(712): Xaa can be any naturally occurring amino acid except Pro or Gly
  SITE (714)..(714): Xaa can be any naturally occurring amino acid
  SITE (715)..(715): Xaa can be any naturally occurring amino acid
  SITE (716)..(716): Xaa can be any naturally occurring amino acid
  SITE (718)..(718): Xaa can be any naturally occurring amino acid except Pro or Gly
  SITE (719)..(719): Xaa can be any naturally occurring amino acid except Pro or Gly
  SITE (721)..(721): Xaa can be any naturally occurring amino acid
  SITE (722)..(722): Xaa can be any naturally occurring amino acid
  SITE (723)..(723): Xaa can be any naturally occurring amino acid
  SITE (725)..(725): Xaa can be any naturally occurring amino acid except Pro or Gly
  SITE (726)..(726): Xaa can be any naturally occurring amino acid except Pro or Gly
  SITE (728)..(728): Xaa can be any naturally occurring amino acid
  SITE (729)..(729): Xaa can be any naturally occurring amino acid
  SITE (730)..(730): Xaa can be any naturally occurring amino acid
  SITE (732)..(732): Xaa can be any naturally occurring amino acid except Pro or Gly
  SITE (733)..(733): Xaa can be any naturally occurring amino acid except Pro or Gly
  SITE (735)..(735): Xaa can be any naturally occurring amino acid
  SITE (736)..(736): Xaa can be any naturally occurring amino acid
  SITE (737)..(737): Xaa can be any naturally occurring amino acid
  SITE (739)..(739): Xaa can be any naturally occurring amino acid except Pro or Gly
  SITE (740)..(740): Xaa can be any naturally occurring amino acid except Pro or Gly
  SITE (742)..(742): Xaa can be any naturally occurring amino acid
  SITE (743)..(743): Xaa can be any naturally occurring amino acid
  SITE (744)..(744): Xaa can be any naturally occurring amino acid
  SITE (746)..(746): Xaa can be any naturally occurring amino acid except Pro or Gly
  SITE (747)..(747): Xaa can be any naturally occurring amino acid except Pro or Gly
  SITE (749)..(749): Xaa can be any naturally occurring amino acid
  SITE (750)..(750): Xaa can be any naturally occurring amino acid
  SITE (751)..(751): Xaa can be any naturally occurring amino acid
  SITE (753)..(753): Xaa can be any naturally occurring amino acid except Pro or Gly
  SITE (754)..(754): Xaa can be any naturally occurring amino acid except Pro or Gly
  SITE (756)..(756): Xaa can be any naturally occurring amino acid
  SITE (757)..(757): Xaa can be any naturally occurring amino acid
  SITE (758)..(758): Xaa can be any naturally occurring amino acid
  SITE (760)..(760): Xaa can be any naturally occurring amino acid except Pro or Gly
  SITE (761)..(761): Xaa can be any naturally occurring amino acid except Pro or Gly
  SITE (763)..(763): Xaa can be any naturally occurring amino acid
  SITE (764)..(764): Xaa can be any naturally occurring amino acid
  SITE (765)..(765): Xaa can be any naturally occurring amino acid
  SITE (767)..(767): Xaa can be any naturally occurring amino acid except Pro or Gly
  SITE (768)..(768): Xaa can be any naturally occurring amino acid except Pro or Gly
  SITE (770)..(770): Xaa can be any naturally occurring amino acid
  SITE (771)..(771): Xaa can be any naturally occurring amino acid
  SITE (772)..(772): Xaa can be any naturally occurring amino acid
  SITE (774)..(774): Xaa can be any naturally occurring amino acid except Pro or Gly
  SITE (775)..(775): Xaa can be any naturally occurring amino acid except Pro or Gly
  SITE (777)..(777): Xaa can be any naturally occurring amino acid
  SITE (778)..(778): Xaa can be any naturally occurring amino acid
  SITE (779)..(779): Xaa can be any naturally occurring amino acid
  SITE (781)..(781): Xaa can be any naturally occurring amino acid except Pro or Gly
  SITE (782)..(782): Xaa can be any naturally occurring amino acid except Pro or Gly
  SITE (784)..(784): Xaa can be any naturally occurring amino acid
  SITE (785)..(785): Xaa can be any naturally occurring amino acid
  SITE (786)..(786): Xaa can be any naturally occurring amino acid
  SITE (788)..(788): Xaa can be any naturally occurring amino acid except Pro or Gly
  SITE (789)..(789): Xaa can be any naturally occurring amino acid except Pro or Gly
  SITE (791)..(791): Xaa can be any naturally occurring amino acid
  SITE (792)..(792): Xaa can be any naturally occurring amino acid
  SITE (793)..(793): Xaa can be any naturally occurring amino acid
  SITE (795)..(795): Xaa can be any naturally occurring amino acid except Pro or Gly
  SITE (796)..(796): Xaa can be any naturally occurring amino acid except Pro or Gly
  SITE (798)..(798): Xaa can be any naturally occurring amino acid
  SITE (799)..(799): Xaa can be any naturally occurring amino acid
  SITE (800)..(800): Xaa can be any naturally occurring amino acid
  SITE (802)..(802): Xaa can be any naturally occurring amino acid except Pro or Gly
  SITE (803)..(803): Xaa can be any naturally occurring amino acid except Pro or Gly
  SITE (805)..(805): Xaa can be any naturally occurring amino acid
  SITE (806)..(806): Xaa can be any naturally occurring amino acid
  SITE (807)..(807): Xaa can be any naturally occurring amino acid
  SITE (809)..(809): Xaa can be any naturally occurring amino acid except Pro or Gly
  SITE (810)..(810): Xaa can be any naturally occurring amino acid except Pro or Gly
  SITE (812)..(812): Xaa can be any naturally occurring amino acid
  SITE (813)..(813): Xaa can be any naturally occurring amino acid
  SITE (814)..(814): Xaa can be any naturally occurring amino acid
  SITE (816)..(816): Xaa can be any naturally occurring amino acid except Pro or Gly
  SITE (817)..(817): Xaa can be any naturally occurring amino acid except Pro or Gly
  SITE (819)..(819): Xaa can be any naturally occurring amino acid
  SITE (820)..(820): Xaa can be any naturally occurring amino acid
  SITE (821)..(821): Xaa can be any naturally occurring amino acid
  SITE (823)..(823): Xaa can be any naturally occurring amino acid except Pro or Gly
  SITE (824)..(824): Xaa can be any naturally occurring amino acid except Pro or Gly
  SITE (826)..(826): Xaa can be any naturally occurring amino acid
  SITE (827)..(827): Xaa can be any naturally occurring amino acid
  SITE (828)..(828): Xaa can be any naturally occurring amino acid
  SITE (830)..(830): Xaa can be any naturally occurring amino acid except Pro or Gly
  SITE (831)..(831): Xaa can be any naturally occurring amino acid except Pro or Gly
  SITE (833)..(833): Xaa can be any naturally occurring amino acid
  SITE (834)..(834): Xaa can be any naturally occurring amino acid
  SITE (835)..(835): Xaa can be any naturally occurring amino acid
  SITE (837)..(837): Xaa can be any naturally occurring amino acid except Pro or Gly
  SITE (838)..(838): Xaa can be any naturally occurring amino acid except Pro or Gly
  SITE (840)..(840): Xaa can be any naturally occurring amino acid
  SITE (841)..(841): Xaa can be any naturally occurring amino acid
  SITE (842)..(842): Xaa can be any naturally occurring amino acid
  SITE (844)..(844): Xaa can be any naturally occurring amino acid except Pro or Gly
  SITE (845)..(845): Xaa can be any naturally occurring amino acid except Pro or Gly
  SITE (847)..(847): Xaa can be any naturally occurring amino acid
  SITE (848)..(848): Xaa can be any naturally occurring amino acid
  SITE (849)..(849): Xaa can be any naturally occurring amino acid
  SITE (851)..(851): Xaa can be any naturally occurring amino acid except Pro or Gly
  SITE (852)..(852): Xaa can be any naturally occurring amino acid except Pro or Gly
  SITE (854)..(854): Xaa can be any naturally occurring amino acid
  SITE (855)..(855): Xaa can be any naturally occurring amino acid
  SITE (856)..(856): Xaa can be any naturally occurring amino acid
  SITE (858)..(858): Xaa can be any naturally occurring amino acid except Pro or Gly
  SITE (859)..(859): Xaa can be any naturally occurring amino acid except Pro or Gly
  SITE (861)..(861): Xaa can be any naturally occurring amino acid
  SITE (862)..(862): Xaa can be any naturally occurring amino acid
  SITE (863)..(863): Xaa can be any naturally occurring amino acid
  SITE (865)..(865): Xaa can be any naturally occurring amino acid except Pro or Gly
  SITE (866)..(866): Xaa can be any naturally occurring amino acid except Pro or Gly
  SITE (868)..(868): Xaa can be any naturally occurring amino acid
  SITE (869)..(869): Xaa can be any naturally occurring amino acid
  SITE (870)..(870): Xaa can be any naturally occurring amino acid
  SITE (872)..(872): Xaa can be any naturally occurring amino acid except Pro or Gly
  SITE (873)..(873): Xaa can be any naturally occurring amino acid except Pro or Gly
  SITE (875)..(875): Xaa can be any naturally occurring amino acid
  SITE (876)..(876): Xaa can be any naturally occurring amino acid
  SITE (877)..(877): Xaa can be any naturally occurring amino acid
  SITE (879)..(879): Xaa can be any naturally occurring amino acid except Pro or Gly
  SITE (880)..(880): Xaa can be any naturally occurring amino acid except Pro or Gly
  SITE (882)..(882): Xaa can be any naturally occurring amino acid
  SITE (883)..(883): Xaa can be any naturally occurring amino acid
  SITE (884)..(884): Xaa can be any naturally occurring amino acid
  SITE (886)..(886): Xaa can be any naturally occurring amino acid except Pro or Gly
  SITE (887)..(887): Xaa can be any naturally occurring amino acid except Pro or Gly
  SITE (889)..(889): Xaa can be any naturally occurring amino acid
  SITE (890)..(890): Xaa can be any naturally occurring amino acid
  SITE (891)..(891): Xaa can be any naturally occurring amino acid
  SITE (893)..(893): Xaa can be any naturally occurring amino acid except Pro or Gly
  SITE (894)..(894): Xaa can be any naturally occurring amino acid except Pro or Gly
  SITE (896)..(896): Xaa can be any naturally occurring amino acid
  SITE (897)..(897): Xaa can be any naturally occurring amino acid
  SITE (898)..(898): Xaa can be any naturally occurring amino acid
  SITE (900)..(900): Xaa can be any naturally occurring amino acid except Pro or Gly
  SITE (901)..(901): Xaa can be any naturally occurring amino acid except Pro or Gly
  SITE (903)..(903): Xaa can be any naturally occurring amino acid
  SITE (904)..(904): Xaa can be any naturally occurring amino acid
  SITE (905)..(905): Xaa can be any naturally occurring amino acid
  SITE (907)..(907): Xaa can be any naturally occurring amino acid except Pro or Gly
  SITE (908)..(908): Xaa can be any naturally occurring amino acid except Pro or Gly
  SITE (910)..(910): Xaa can be any naturally occurring amino acid
  SITE (911)..(911): Xaa can be any naturally occurring amino acid
  SITE (912)..(912): Xaa can be any naturally occurring amino acid
  SITE (914)..(914): Xaa can be any naturally occurring amino acid except Pro or Gly
  SITE (915)..(915): Xaa can be any naturally occurring amino acid except Pro or Gly
  SITE (917)..(917): Xaa can be any naturally occurring amino acid
  SITE (918)..(918): Xaa can be any naturally occurring amino acid
  SITE (919)..(919): Xaa can be any naturally occurring amino acid
  SITE (921)..(921): Xaa can be any naturally occurring amino acid except Pro or Gly
  SITE (922)..(922): Xaa can be any naturally occurring amino acid except Pro or Gly
  SITE (924)..(924): Xaa can be any naturally occurring amino acid
  SITE (925)..(925): Xaa can be any naturally occurring amino acid
  SITE (926)..(926): Xaa can be any naturally occurring amino acid
  SITE (928)..(928): Xaa can be any naturally occurring amino acid except Pro or Gly
  SITE (929)..(929): Xaa can be any naturally occurring amino acid except Pro or Gly
  SITE (931)..(931): Xaa can be any naturally occurring amino acid
  SITE (932)..(932): Xaa can be any naturally occurring amino acid
  SITE (933)..(933): Xaa can be any naturally occurring amino acid
  SITE (935)..(935): Xaa can be any naturally occurring amino acid except Pro or Gly
  SITE (936)..(936): Xaa can be any naturally occurring amino acid except Pro or Gly
  SITE (938)..(938): Xaa can be any naturally occurring amino acid
  SITE (939)..(939): Xaa can be any naturally occurring amino acid
  SITE (940)..(940): Xaa can be any naturally occurring amino acid
  SITE (942)..(942): Xaa can be any naturally occurring amino acid except Pro or Gly
  SITE (943)..(943): Xaa can be any naturally occurring amino acid except Pro or Gly
  SITE (945)..(945): Xaa can be any naturally occurring amino acid
  SITE (946)..(946): Xaa can be any naturally occurring amino acid
  SITE (947)..(947): Xaa can be any naturally occurring amino acid
  SITE (949)..(949): Xaa can be any naturally occurring amino acid except Pro or Gly
  SITE (950)..(950): Xaa can be any naturally occurring amino acid except Pro or Gly
  SITE (952)..(952): Xaa can be any naturally occurring amino acid
  SITE (953)..(953): Xaa can be any naturally occurring amino acid
  SITE (954)..(954): Xaa can be any naturally occurring amino acid
  SITE (956)..(956): Xaa can be any naturally occurring amino acid except Pro or Gly
  SITE (957)..(957): Xaa can be any naturally occurring amino acid except Pro or Gly
  SITE (959)..(959): Xaa can be any naturally occurring amino acid
  SITE (960)..(960): Xaa can be any naturally occurring amino acid
  SITE (961)..(961): Xaa can be any naturally occurring amino acid
  SITE (963)..(963): Xaa can be any naturally occurring amino acid except Pro or Gly
  SITE (964)..(964): Xaa can be any naturally occurring amino acid except Pro or Gly
  SITE (966)..(966): Xaa can be any naturally occurring amino acid
  SITE (967)..(967): Xaa can be any naturally occurring amino acid
  SITE (968)..(968): Xaa can be any naturally occurring amino acid
  SITE (970)..(970): Xaa can be any naturally occurring amino acid except Pro or Gly
  SITE (971)..(971): Xaa can be any naturally occurring amino acid except Pro or Gly
  SITE (973)..(973): Xaa can be any naturally occurring amino acid
  SITE (974)..(974): Xaa can be any naturally occurring amino acid
  SITE (975)..(975): Xaa can be any naturally occurring amino acid
  SITE (977)..(977): Xaa can be any naturally occurring amino acid except Pro or Gly
  SITE (978)..(978): Xaa can be any naturally occurring amino acid except Pro or Gly
  SITE (980)..(980): Xaa can be any naturally occurring amino acid
  SITE (981)..(981): Xaa can be any naturally occurring amino acid
  SITE (982)..(982): Xaa can be any naturally occurring amino acid
  SITE (984)..(984): Xaa can be any naturally occurring amino acid except Pro or Gly
  SITE (985)..(985): Xaa can be any naturally occurring amino acid except Pro or Gly
  SITE (987)..(987): Xaa can be any naturally occurring amino acid
  SITE (988)..(988): Xaa can be any naturally occurring amino acid
  SITE (989)..(989): Xaa can be any naturally occurring amino acid
  SITE (991)..(991): Xaa can be any naturally occurring amino acid except Pro or Gly
  SITE (992)..(992): Xaa can be any naturally occurring amino acid except Pro or Gly
  SITE (994)..(994): Xaa can be any naturally occurring amino acid
  SITE (995)..(995): Xaa can be any naturally occurring amino acid
  SITE (996)..(996): Xaa can be any naturally occurring amino acid
  SITE (998)..(998): Xaa can be any naturally occurring amino acid except Pro or Gly
  SITE (999)..(999): Xaa can be any naturally occurring amino acid except Pro or Gly
  SITE (1001)..(1001): Xaa can be any naturally occurring amino acid
  SITE (1002)..(1002): Xaa can be any naturally occurring amino acid
  SITE (1003)..(1003): Xaa can be any naturally occurring amino acid
  SITE (1005)..(1005): Xaa can be any naturally occurring amino acid except Pro or Gly
  SITE (1006)..(1006): Xaa can be any naturally occurring amino acid except Pro or Gly
  SITE (1008)..(1008): Xaa can be any naturally occurring amino acid
  SITE (1009)..(1009): Xaa can be any naturally occurring amino acid
  SITE (1010)..(1010): Xaa can be any naturally occurring amino acid
  SITE (1012)..(1012): Xaa can be any naturally occurring amino acid except Pro or Gly
  SITE (1013)..(1013): Xaa can be any naturally occurring amino acid except Pro or Gly
  SITE (1015)..(1015): Xaa can be any naturally occurring amino acid
  SITE (1016)..(1016): Xaa can be any naturally occurring amino acid
  SITE (1017)..(1017): Xaa can be any naturally occurring amino acid
  SITE (1019)..(1019): Xaa can be any naturally occurring amino acid except Pro or Gly
  SITE (1020)..(1020): Xaa can be any naturally occurring amino acid except Pro or Gly
  SITE (1022)..(1022): Xaa can be any naturally occurring amino acid
  SITE (1023)..(1023): Xaa can be any naturally occurring amino acid
  SITE (1024)..(1024): Xaa can be any naturally occurring amino acid
  SITE (1026)..(1026): Xaa can be any naturally occurring amino acid except Pro or Gly
  SITE (1027)..(1027): Xaa can be any naturally occurring amino acid except Pro or Gly
  SITE (1029)..(1029): Xaa can be any naturally occurring amino acid
  SITE (1030)..(1030): Xaa can be any naturally occurring amino acid
  SITE (1031)..(1031): Xaa can be any naturally occurring amino acid
  SITE (1033)..(1033): Xaa can be any naturally occurring amino acid except Pro or Gly
  SITE (1034)..(1034): Xaa can be any naturally occurring amino acid except Pro or Gly
  SITE (1036)..(1036): Xaa can be any naturally occurring amino acid
  SITE (1037)..(1037): Xaa can be any naturally occurring amino acid
  SITE (1038)..(1038): Xaa can be any naturally occurring amino acid
  SITE (1040)..(1040): Xaa can be any naturally occurring amino acid except Pro or Gly
  SITE (1041)..(1041): Xaa can be any naturally occurring amino acid except Pro or Gly
  SITE (1043)..(1043): Xaa can be any naturally occurring amino acid
  SITE (1044)..(1044): Xaa can be any naturally occurring amino acid
  SITE (1045)..(1045): Xaa can be any naturally occurring amino acid
  SITE (1047)..(1047): Xaa can be any naturally occurring amino acid except Pro or Gly
  SITE (1048)..(1048): Xaa can be any naturally occurring amino acid except Pro or Gly
  SITE (1050)..(1050): Xaa can be any naturally occurring amino acid
  SITE (1051)..(1051): Xaa can be any naturally occurring amino acid
  SITE (1052)..(1052): Xaa can be any naturally occurring amino acid
  SITE (1054)..(1054): Xaa can be any naturally occurring amino acid except Pro or Gly
  SITE (1055)..(1055): Xaa can be any naturally occurring amino acid except Pro or Gly
  SITE (1057)..(1057): Xaa can be any naturally occurring amino acid
  SITE (1058)..(1058): Xaa can be any naturally occurring amino acid
  SITE (1059)..(1059): Xaa can be any naturally occurring amino acid
  SITE (1061)..(1061): Xaa can be any naturally occurring amino acid except Pro or Gly
  SITE (1062)..(1062): Xaa can be any naturally occurring amino acid except Pro or Gly
  SITE (1064)..(1064): Xaa can be any naturally occurring amino acid
  SITE (1065)..(1065): Xaa can be any naturally occurring amino acid
  SITE (1066)..(1066): Xaa can be any naturally occurring amino acid
  SITE (1068)..(1068): Xaa can be any naturally occurring amino acid except Pro or Gly
  SITE (1069)..(1069): Xaa can be any naturally occurring amino acid except Pro or Gly
  SITE (1071)..(1071): Xaa can be any naturally occurring amino acid
  SITE (1072)..(1072): Xaa can be any naturally occurring amino acid
  SITE (1073)..(1073): Xaa can be any naturally occurring amino acid
  SITE (1075)..(1075): Xaa can be any naturally occurring amino acid except Pro or Gly
  SITE (1076)..(1076): Xaa can be any naturally occurring amino acid except Pro or Gly
  SITE (1078)..(1078): Xaa can be any naturally occurring amino acid
  SITE (1079)..(1079): Xaa can be any naturally occurring amino acid
  SITE (1080)..(1080): Xaa can be any naturally occurring amino acid
  SITE (1082)..(1082): Xaa can be any naturally occurring amino acid except Pro or Gly
  SITE (1083)..(1083): Xaa can be any naturally occurring amino acid except Pro or Gly
  SITE (1085)..(1085): Xaa can be any naturally occurring amino acid
  SITE (1086)..(1086): Xaa can be any naturally occurring amino acid
  SITE (1087)..(1087): Xaa can be any naturally occurring amino acid
  SITE (1089)..(1089): Xaa can be any naturally occurring amino acid except Pro or Gly
  SITE (1090)..(1090): Xaa can be any naturally occurring amino acid except Pro or Gly
  SITE (1092)..(1092): Xaa can be any naturally occurring amino acid
  SITE (1093)..(1093): Xaa can be any naturally occurring amino acid
  SITE (1094)..(1094): Xaa can be any naturally occurring amino acid
  SITE (1096)..(1096): Xaa can be any naturally occurring amino acid except Pro or Gly
  SITE (1097)..(1097): Xaa can be any naturally occurring amino acid except Pro or Gly
  SITE (1099)..(1099): Xaa can be any naturally occurring amino acid
  SITE (1100)..(1100): Xaa can be any naturally occurring amino acid
  SITE (1101)..(1101): Xaa can be any naturally occurring amino acid
  SITE (1103)..(1103): Xaa can be any naturally occurring amino acid except Pro or Gly
  SITE (1104)..(1104): Xaa can be any naturally occurring amino acid except Pro or Gly
  SITE (1106)..(1106): Xaa can be any naturally occurring amino acid
  SITE (1107)..(1107): Xaa can be any naturally occurring amino acid
  SITE (1108)..(1108): Xaa can be any naturally occurring amino acid
  SITE (1110)..(1110): Xaa can be any naturally occurring amino acid except Pro or Gly
  SITE (1111)..(1111): Xaa can be any naturally occurring amino acid except Pro or Gly
  SITE (1113)..(1113): Xaa can be any naturally occurring amino acid
  SITE (1114)..(1114): Xaa can be any naturally occurring amino acid
  SITE (1115)..(1115): Xaa can be any naturally occurring amino acid
  SITE (1117)..(1117): Xaa can be any naturally occurring amino acid except Pro or Gly
  SITE (1118)..(1118): Xaa can be any naturally occurring amino acid except Pro or Gly
  SITE (1120)..(1120): Xaa can be any naturally occurring amino acid
XXPXXGXXXPXXGXXXPXXGXXXPXXGXXXPXXGXXXPXXGXXXPXXGXXXPXXGXXXPXXGXXXPXXGXXXPXXGXXXPXXGXXXPXXGXXXPXXGXXXPXXGXXXPXXGXXXPXXGXXXPXXGXXXPXXGXXXPXXGXXXPXXGXXXPXXGXXXPXXGXXXPXXGXXXPXXGXXXPXXGXXXPXXGXXXPXXGXXXPXXGXXXPXXGXXXPXXGXXXPXXGXXXPXXGXXXPXXGXXXPXXGXXXPXXGXXXPXXGXXXPXXGXXXPXXGXXXPXXGXXXPXXGXXXPXXGXXXPXXGXXXPXXGXXXPXXGXXXPXXGXXXPXXGXXXPXXGXXXPXXGXXXPXXGXXXPXXGXXXPXXGXXXPXXGXXXPXXGXXXPXXGXXXPXXGXXXPXXGXXXPXXGXXXPXXGXXXPXXGXXXPXXGXXXPXXGXXXPXXGXXXPXXGXXXPXXGXXXPXXGXXXPXXGXXXPXXGXXXPXXGXXXPXXGXXXPXXGXXXPXXGXXXPXXGXXXPXXGXXXPXXGXXXPXXGXXXPXXGXXXPXXGXXXPXXGXXXPXXGXXXPXXGXXXPXXGXXXPXXGXXXPXXGXXXPXXGXXXPXXGXXXPXXGXXXPXXGXXXPXXGXXXPXXGXXXPXXGXXXPXXGXXXPXXGXXXPXXGXXXPXXGXXXPXXGXXXPXXGXXXPXXGXXXPXXGXXXPXXGXXXPXXGXXXPXXGXXXPXXGXXXPXXGXXXPXXGXXXPXXGXXXPXXGXXXPXXGXXXPXXGXXXPXXGXXXPXXGXXXPXXGXXXPXXGXXXPXXGXXXPXXGXXXPXXGXXXPXXGXXXPXXGXXXPXXGXXXPXXGXXXPXXGXXXPXXGXXXPXXGXXXPXXGXXXPXXGXXXPXXGXXXPXXGXXXPXXGXXXPXXGXXXPXXGXXXPXXGXXXPXXGXXXPXXGXXXPXXGXXXPXXGXXXPXXGXXXPXXGXXXPXXGXXXPXXGXXXPXXGXXXPXXGXXXPXXGXXXPXXGXXXPXXGXXXPXXGXXXPXXGXXXPXXGXXXPXXGXXXPXXGXXXPXXGXXXPXXGXXXPXXGXXXPXXGXXXPXXGXXXPXXGXXXPXXGXXXPXXGXXXPXXGXXXPXXGXXXPXXGX

SEQ ID NO: 151 - protein, 1280 aa, Artificial Sequence
  elastin-like polypeptide
  SITE (1)..(1): Xaa can be any naturally occurring amino acid
  SITE (2)..(2): Xaa can be any naturally occurring amino acid
  SITE (4)..(4): Xaa can be any naturally occurring amino acid except Pro or Gly
  SITE (5)..(5): Xaa can be any naturally occurring amino acid except Pro or Gly
  SITE (6)..(6): Xaa can be any naturally occurring amino acid except Pro or Gly
  SITE (8)..(8): Xaa can be any naturally occurring amino acid
  SITE (9)..(9): Xaa can be any naturally occurring amino acid
  SITE (10)..(10): Xaa can be any naturally occurring amino acid
  SITE (12)..(12): Xaa can be any naturally occurring amino acid except Pro or Gly
  SITE (13)..(13): Xaa can be any naturally occurring amino acid except Pro or Gly
  SITE (14)..(14): Xaa can be any naturally occurring amino acid except Pro or Gly
  SITE (16)..(16): Xaa can be any naturally occurring amino acid
  SITE (17)..(17): Xaa can be any naturally occurring amino acid
  SITE (18)..(18): Xaa can be any naturally occurring amino acid
  SITE (20)..(20): Xaa can be any naturally occurring amino acid except Pro or Gly
  SITE (21)..(21): Xaa can be any naturally occurring amino acid except Pro or Gly
  SITE (22)..(22): Xaa can be any naturally occurring amino acid except Pro or Gly
  SITE (24)..(24): Xaa can be any naturally occurring amino acid
  SITE (25)..(25): Xaa can be any naturally occurring amino acid
  SITE (26)..(26): Xaa can be any naturally occurring amino acid
  SITE (28)..(28): Xaa can be any naturally occurring amino acid except Pro or Gly
  SITE (29)..(29): Xaa can be any naturally occurring amino acid except Pro or Gly
  SITE (30)..(30): Xaa can be any naturally occurring amino acid except Pro or Gly
  SITE (32)..(32): Xaa can be any naturally occurring amino acid
  SITE (33)..(33): Xaa can be any naturally occurring amino acid
  SITE (34)..(34): Xaa can be any naturally occurring amino acid
  SITE (36)..(36): Xaa can be any naturally occurring amino acid except Pro or Gly
  SITE (37)..(37): Xaa can be any naturally occurring amino acid except Pro or Gly
  SITE (38)..(38): Xaa can be any naturally occurring amino acid except Pro or Gly
  SITE (40)..(40): Xaa can be any naturally occurring amino acid
  SITE (41)..(41): Xaa can be any naturally occurring amino acid
  SITE (42)..(42): Xaa can be any naturally occurring amino acid
  SITE (44)..(44): Xaa can be any naturally occurring amino acid except Pro or Gly
  SITE (45)..(45): Xaa can be any naturally occurring amino acid except Pro or Gly
  SITE (46)..(46): Xaa can be any naturally occurring amino acid except Pro or Gly
  SITE (48)..(48): Xaa can be any naturally occurring amino acid
  SITE (49)..(49): Xaa can be any naturally occurring amino acid
  SITE (50)..(50): Xaa can be any naturally occurring amino acid
  SITE (52)..(52): Xaa can be any naturally occurring amino acid except Pro or Gly
  SITE (53)..(53): Xaa can be any naturally occurring amino acid except Pro or Gly
  SITE (54)..(54): Xaa can be any naturally occurring amino acid except Pro or Gly
  SITE (56)..(56): Xaa can be any naturally occurring amino acid
  SITE (57)..(57): Xaa can be any naturally occurring amino acid
  SITE (58)..(58): Xaa can be any naturally occurring amino acid
  SITE (60)..(60): Xaa can be any naturally occurring amino acid except Pro or Gly
  SITE (61)..(61): Xaa can be any naturally occurring amino acid except Pro or Gly
  SITE (62)..(62): Xaa can be any naturally occurring amino acid except Pro or Gly
  SITE (64)..(64): Xaa can be any naturally occurring amino acid
  SITE (65)..(65): Xaa can be any naturally occurring amino acid
  SITE (66)..(66): Xaa can be any naturally occurring amino acid
  SITE (68)..(68): Xaa can be any naturally occurring amino acid except Pro or Gly
  SITE (69)..(69): Xaa can be any naturally occurring amino acid except Pro or Gly
  SITE (70)..(70): Xaa can be any naturally occurring amino acid except Pro or Gly
  SITE (72)..(72): Xaa can be any naturally occurring amino acid
  SITE (73)..(73): Xaa can be any naturally occurring amino acid
  SITE (74)..(74): Xaa can be any naturally occurring amino acid
  SITE (76)..(76): Xaa can be any naturally occurring amino acid except Pro or Gly
  SITE (77)..(77): Xaa can be any naturally occurring amino acid except Pro or Gly
  SITE (78)..(78): Xaa can be any naturally occurring amino acid except Pro or Gly
  SITE (80)..(80): Xaa can be any naturally occurring amino acid
  SITE (81)..(1280): May be present or absent in groups of the repeat unit Xaa Xaa Pro Xaa Xaa Xaa Gly Xaa
  SITE (81)..(81): Xaa can be any naturally occurring amino acid
  SITE (82)..(82): Xaa can be any naturally occurring amino acid
  SITE (84)..(84): Xaa can be any naturally occurring amino acid except Pro or Gly
  SITE (85)..(85): Xaa can be any naturally occurring amino acid except Pro or Gly
  SITE (86)..(86): Xaa can be any naturally occurring amino acid except Pro or Gly
  SITE (88)..(88): Xaa can be any naturally occurring amino acid
  SITE (89)..(89): Xaa can be any naturally occurring amino acid
  SITE (90)..(90): Xaa can be any naturally occurring amino acid
  SITE (92)..(92): Xaa can be any naturally occurring amino acid except Pro or Gly
  SITE (93)..(93): Xaa can be any naturally occurring amino acid except Pro or Gly
  SITE (94)..(94): Xaa can be any naturally occurring amino acid except Pro or Gly
  SITE (96)..(96): Xaa can be any naturally occurring amino acid
  SITE (97)..(97): Xaa can be any naturally occurring amino acid
  SITE (98)..(98): Xaa can be any naturally occurring amino acid
  SITE (100)..(100): Xaa can be any naturally occurring amino acid except Pro or Gly
  SITE (101)..(101): Xaa can be any naturally occurring amino acid except Pro or Gly
  SITE (102)..(102): Xaa can be any naturally occurring amino acid except Pro or Gly
  SITE (104)..(104): Xaa can be any naturally occurring amino acid
  SITE (105)..(105): Xaa can be any naturally occurring amino acid
  SITE (106)..(106): Xaa can be any naturally occurring amino acid
  SITE (108)..(108): Xaa can be any naturally occurring amino acid except Pro or Gly
  SITE (109)..(109): Xaa can be any naturally occurring amino acid except Pro or Gly
  SITE (110)..(110): Xaa can be any naturally occurring amino acid except Pro or Gly
  SITE (112)..(112): Xaa can be any naturally occurring amino acid
  SITE (113)..(113): Xaa can be any naturally occurring amino acid
  SITE (114)..(114): Xaa can be any naturally occurring amino acid
  SITE (116)..(116): Xaa can be any naturally occurring amino acid except Pro or Gly
  SITE (117)..(117): Xaa can be any naturally occurring amino acid except Pro or Gly
  SITE (118)..(118): Xaa can be any naturally occurring amino acid except Pro or Gly
  SITE (120)..(120): Xaa can be any naturally occurring amino acid
  SITE (121)..(121): Xaa can be any naturally occurring amino acid
  SITE (122)..(122): Xaa can be any naturally occurring amino acid
  SITE (124)..(124): Xaa can be any naturally occurring amino acid except Pro or Gly
  SITE (125)..(125): Xaa can be any naturally occurring amino acid except Pro or Gly
  SITE (126)..(126): Xaa can be any naturally occurring amino acid except Pro or Gly
  SITE (128)..(128): Xaa can be any naturally occurring amino acid
  SITE (129)..(129): Xaa can be any naturally occurring amino acid
  SITE (130)..(130): Xaa can be any naturally occurring amino acid
  SITE (132)..(132): Xaa can be any naturally occurring amino acid except Pro or Gly
  SITE (133)..(133): Xaa can be any naturally occurring amino acid except Pro or Gly
  SITE (134)..(134): Xaa can be any naturally occurring amino acid except Pro or Gly
  SITE (136)..(136): Xaa can be any naturally occurring amino acid
  SITE (137)..(137): Xaa can be any naturally occurring amino acid
  SITE (138)..(138): Xaa can be any naturally occurring amino acid
  SITE (140)..(140): Xaa can be any naturally occurring amino acid except Pro or Gly
  SITE (141)..(141): Xaa can be any naturally occurring amino acid except Pro or Gly
  SITE (142)..(142): Xaa can be any naturally occurring amino acid except Pro or Gly
  SITE (144)..(144): Xaa can be any naturally occurring amino acid
  SITE (145)..(145): Xaa can be any naturally occurring amino acid
  SITE (146)..(146): Xaa can be any naturally occurring amino acid
  SITE (148)..(148): Xaa can be any naturally occurring amino acid except Pro or Gly
  SITE (149)..(149): Xaa can be any naturally occurring amino acid except Pro or Gly
  SITE (150)..(150): Xaa can be any naturally occurring amino acid except Pro or Gly
  SITE (152)..(152): Xaa can be any naturally occurring amino acid
  SITE (153)..(153): Xaa can be any naturally occurring amino acid
  SITE (154)..(154): Xaa can be any naturally occurring amino acid
  SITE (156)..(156): Xaa can be any naturally occurring amino acid except Pro or Gly
  SITE (157)..(157): Xaa can be any naturally occurring amino acid except Pro or Gly
  SITE (158)..(158): Xaa can be any naturally occurring amino acid except Pro or Gly
  SITE (160)..(160): Xaa can be any naturally occurring amino acid
  SITE (161)..(161): Xaa can be any naturally occurring amino acid
  SITE (162)..(162): Xaa can be any naturally occurring amino acid
  SITE (164)..(164): Xaa can be any naturally occurring amino acid except Pro or Gly
  SITE (165)..(165): Xaa can be any naturally occurring amino acid except Pro or Gly
  SITE (166)..(166): Xaa can be any naturally occurring amino acid except Pro or Gly
  SITE (168)..(168): Xaa can be any naturally occurring amino acid
  SITE (169)..(169): Xaa can be any naturally occurring amino acid
  SITE (170)..(170): Xaa can be any naturally occurring amino acid
  SITE (172)..(172): Xaa can be any naturally occurring amino acid except Pro or Gly
  SITE (173)..(173): Xaa can be any naturally occurring amino acid except Pro or Gly
  SITE (174)..(174): Xaa can be any naturally occurring amino acid except Pro or Gly
  SITE (176)..(176): Xaa can be any naturally occurring amino acid
  SITE (177)..(177): Xaa can be any naturally occurring amino acid
  SITE (178)..(178): Xaa can be any naturally occurring amino acid
  SITE (180)..(180): Xaa can be any naturally occurring amino acid except Pro or Gly
  SITE (181)..(181): Xaa can be any naturally occurring amino acid except Pro or Gly
  SITE (182)..(182): Xaa can be any naturally occurring amino acid except Pro or Gly
  SITE (184)..(184): Xaa can be any naturally occurring amino acid
  SITE (185)..(185): Xaa can be any naturally occurring amino acid
  SITE (186)..(186): Xaa can be any naturally occurring amino acid
  SITE (188)..(188): Xaa can be any naturally occurring amino acid except Pro or Gly
  SITE (189)..(189): Xaa can be any naturally occurring amino acid except Pro or Gly
  SITE (190)..(190): Xaa can be any naturally occurring amino acid except Pro or Gly
  SITE (192)..(192): Xaa can be any naturally occurring amino acid
  SITE (193)..(193): Xaa can be any naturally occurring amino acid
  SITE (194)..(194): Xaa can be any naturally occurring amino acid
  SITE (196)..(196): Xaa can be any naturally occurring amino acid except Pro or Gly
  SITE (197)..(197): Xaa can be any naturally occurring amino acid except Pro or Gly
  SITE (198)..(198): Xaa can be any naturally occurring amino acid except Pro or Gly
  SITE (200)..(200): Xaa can be any naturally occurring amino acid
  SITE (201)..(201): Xaa can be any naturally occurring amino acid
  SITE (202)..(202): Xaa can be any naturally occurring amino acid
  SITE (204)..(204): Xaa can be any naturally occurring amino acid except Pro or Gly
  SITE (205)..(205): Xaa can be any naturally occurring amino acid except Pro or Gly
  SITE (206)..(206): Xaa can be any naturally occurring amino acid except Pro or Gly
  SITE (208)..(208): Xaa can be any naturally occurring amino acid
  SITE (209)..(209): Xaa can be any naturally occurring amino acid
  SITE (210)..(210): Xaa can be any naturally occurring amino acid
  SITE (212)..(212): Xaa can be any naturally occurring amino acid except Pro or Gly
  SITE (213)..(213): Xaa can be any naturally occurring amino acid except Pro or Gly
  SITE (214)..(214): Xaa can be any naturally occurring amino acid except Pro or Gly
  SITE (216)..(216): Xaa can be any naturally occurring amino acid
  SITE (217)..(217): Xaa can be any naturally occurring amino acid
  SITE (218)..(218): Xaa can be any naturally occurring amino acid
  SITE (220)..(220): Xaa can be any naturally occurring amino acid except Pro or Gly
  SITE (221)..(221): Xaa can be any naturally occurring amino acid except Pro or Gly
  SITE (222)..(222): Xaa can be any naturally occurring amino acid except Pro or Gly
  SITE (224)..(224): Xaa can be any naturally occurring amino acid
  SITE (225)..(225): Xaa can be any naturally occurring amino acid
  SITE (226)..(226): Xaa can be any naturally occurring amino acid
  SITE (228)..(228): Xaa can be any naturally occurring amino acid except Pro or Gly
  SITE (229)..(229): Xaa can be any naturally occurring amino acid except Pro or Gly
  SITE (230)..(230): Xaa can be any naturally occurring amino acid except Pro or Gly
  SITE (232)..(232): Xaa can be any naturally occurring amino acid
  SITE (233)..(233): Xaa can be any naturally occurring amino acid
  SITE (234)..(234): Xaa can be any naturally occurring amino acid
  SITE (236)..(236): Xaa can be any naturally occurring amino acid except Pro or Gly
  SITE (237)..(237): Xaa can be any naturally occurring amino acid except Pro or Gly
  SITE (238)..(238): Xaa can be any naturally occurring amino acid except Pro or Gly
  SITE (240)..(240): Xaa can be any naturally occurring amino acid
  SITE (241)..(241): Xaa can be any naturally occurring amino acid
  SITE (242)..(242): Xaa can be any naturally occurring amino acid
  SITE (244)..(244): Xaa can be any naturally occurring amino acid except Pro or Gly
  SITE (245)..(245): Xaa can be any naturally occurring amino acid except Pro or Gly
  SITE (246)..(246): Xaa can be any naturally occurring amino acid except Pro or Gly
  SITE (248)..(248): Xaa can be any naturally occurring amino acid
  SITE (249)..(249): Xaa can be any naturally occurring amino acid
  SITE (250)..(250): Xaa can be any naturally occurring amino acid
  SITE (252)..(252): Xaa can be any naturally occurring amino acid except Pro or Gly
  SITE (253)..(253): Xaa can be any naturally occurring amino acid except Pro or Gly
  SITE (254)..(254): Xaa can be any naturally occurring amino acid except Pro or Gly
  SITE (256)..(256): Xaa can be any naturally occurring amino acid
  SITE (257)..(257): Xaa can be any naturally occurring amino acid
  SITE (258)..(258): Xaa can be any naturally occurring amino acid
  SITE (260)..(260): Xaa can be any naturally occurring amino acid except Pro or Gly
  SITE (261)..(261): Xaa can be any naturally occurring amino acid except Pro or Gly
  SITE (262)..(262): Xaa can be any naturally occurring amino acid except Pro or Gly
  SITE (264)..(264): Xaa can be any naturally occurring amino acid
  SITE (265)..(265): Xaa can be any naturally occurring amino acid
  SITE (266)..(266): Xaa can be any naturally occurring amino acid
  SITE (268)..(268): Xaa can be any naturally occurring amino acid except Pro or Gly
  SITE (269)..(269): Xaa can be any naturally occurring amino acid except Pro or Gly
  SITE (270)..(270): Xaa can be any naturally occurring amino acid except Pro or Gly
  SITE (272)..(272): Xaa can be any naturally occurring amino acid
  SITE (273)..(273): Xaa can be any naturally occurring amino acid
  SITE (274)..(274): Xaa can be any naturally occurring amino acid
  SITE (276)..(276): Xaa can be any naturally occurring amino acid except Pro or Gly
  SITE (277)..(277): Xaa can be any naturally occurring amino acid except Pro or Gly
  SITE (278)..(278): Xaa can be any naturally occurring amino acid except Pro or Gly
  SITE (280)..(280): Xaa can be any naturally occurring amino acid
  SITE (281)..(281): Xaa can be any naturally occurring amino acid
  SITE (282)..(282): Xaa can be any naturally occurring amino acid
  SITE (284)..(284): Xaa can be any naturally occurring amino acid except Pro or Gly
  SITE (285)..(285): Xaa can be any naturally occurring amino acid except Pro or Gly
  SITE (286)..(286): Xaa can be any naturally occurring amino acid except Pro or Gly
  SITE (288)..(288): Xaa can be any naturally occurring amino acid
  SITE (289)..(289): Xaa can be any naturally occurring amino acid
  SITE (290)..(290): Xaa can be any naturally occurring amino acid
  SITE (292)..(292): Xaa can be any naturally occurring amino acid except Pro or Gly
  SITE (293)..(293): Xaa can be any naturally occurring amino acid except Pro or Gly
  SITE (294)..(294): Xaa can be any naturally occurring amino acid except Pro or Gly
  SITE (296)..(296): Xaa can be any naturally occurring amino acid
  SITE (297)..(297): Xaa can be any naturally occurring amino acid
  SITE (298)..(298): Xaa can be any naturally occurring amino acid
  SITE (300)..(300): Xaa can be any naturally occurring amino acid except Pro or Gly
  SITE (301)..(301): Xaa can be any naturally occurring amino acid except Pro or Gly
  SITE (302)..(302): Xaa can be any naturally occurring amino acid except Pro or Gly
  SITE (304)..(304): Xaa can be any naturally occurring amino acid
  SITE (305)..(305): Xaa can be any naturally occurring amino acid
  SITE (306)..(306): Xaa can be any naturally occurring amino acid
  SITE (308)..(308): Xaa can be any naturally occurring amino acid except Pro or Gly
  SITE (309)..(309): Xaa can be any naturally occurring amino acid except Pro or Gly
  SITE (310)..(310): Xaa can be any naturally occurring amino acid except Pro or Gly
  SITE (312)..(312): Xaa can be any naturally occurring amino acid
  SITE (313)..(313): Xaa can be any naturally occurring amino acid
  SITE (314)..(314): Xaa can be any naturally occurring amino acid
  SITE (316)..(316): Xaa can be any naturally occurring amino acid except Pro or Gly
  SITE (317)..(317): Xaa can be any naturally occurring amino acid except Pro or Gly
  SITE (318)..(318): Xaa can be any naturally occurring amino acid except Pro or Gly
  SITE (320)..(320): Xaa can be any naturally occurring amino acid
  SITE (321)..(321): Xaa can be any naturally occurring amino acid
  SITE (322)..(322): Xaa can be any naturally occurring amino acid
  SITE (324)..(324): Xaa can be any naturally occurring amino acid except Pro or Gly
  SITE (325)..(325): Xaa can be any naturally occurring amino acid except Pro or Gly
  SITE (326)..(326): Xaa can be any naturally occurring amino acid except Pro or Gly
  SITE (328)..(328): Xaa can be any naturally occurring amino acid
  SITE (329)..(329): Xaa can be any naturally occurring amino acid
  SITE (330)..(330): Xaa can be any naturally occurring amino acid
  SITE (332)..(332): Xaa can be any naturally occurring amino acid except Pro or Gly
  SITE (333)..(333): Xaa can be any naturally occurring amino acid except Pro or Gly
  SITE (334)..(334): Xaa can be any naturally occurring amino acid except Pro or Gly
  SITE (336)..(336): Xaa can be any naturally occurring amino acid
  SITE (337)..(337): Xaa can be any naturally occurring amino acid
  SITE (338)..(338): Xaa can be any naturally occurring amino acid
  SITE (340)..(340): Xaa can be any naturally occurring amino acid except Pro or Gly
  SITE (341)..(341): Xaa can be any naturally occurring amino acid except Pro or Gly
  SITE (342)..(342): Xaa can be any naturally occurring amino acid except Pro or Gly
  SITE (344)..(344): Xaa can be any naturally occurring amino acid
  SITE (345)..(345): Xaa can be any naturally occurring amino acid
  SITE (346)..(346): Xaa can be any naturally occurring amino acid
  SITE (348)..(348): Xaa can be any naturally occurring amino acid except Pro or Gly
  SITE (349)..(349): Xaa can be any naturally occurring amino acid except Pro or Gly
  SITE (350)..(350): Xaa can be any naturally occurring amino acid except Pro or Gly
  SITE (352)..(352): Xaa can be any naturally occurring amino acid
  SITE (353)..(353): Xaa can be any naturally occurring amino acid
  SITE (354)..(354): Xaa can be any naturally occurring amino acid
  SITE (356)..(356): Xaa can be any naturally occurring amino acid except Pro or Gly
  SITE (357)..(357): Xaa can be any naturally occurring amino acid except Pro or Gly
  SITE (358)..(358): Xaa can be any naturally occurring amino acid except Pro or Gly
  SITE (360)..(360): Xaa can be any naturally occurring amino acid
  SITE (361)..(361): Xaa can be any naturally occurring amino acid
  SITE (362)..(362): Xaa can be any naturally occurring amino acid
  SITE (364)..(364): Xaa can be any naturally occurring amino acid except Pro or Gly
  SITE (365)..(365): Xaa can be any naturally occurring amino acid except Pro or Gly
  SITE (366)..(366): Xaa can be any naturally occurring amino acid except Pro or Gly
  SITE (368)..(368): Xaa can be any naturally occurring amino acid
  SITE (369)..(369): Xaa can be any naturally occurring amino acid
  SITE (370)..(370): Xaa can be any naturally occurring amino acid
  SITE (372)..(372): Xaa can be any naturally occurring amino acid except Pro or Gly
  SITE (373)..(373): Xaa can be any naturally occurring amino acid except Pro or Gly
  SITE (374)..(374): Xaa can be any naturally occurring amino acid except Pro or Gly
  SITE (376)..(376): Xaa can be any naturally occurring amino acid
  SITE (377)..(377): Xaa can be any naturally occurring amino acid
  SITE (378)..(378): Xaa can be any naturally occurring amino acid
  SITE (380)..(380): Xaa can be any naturally occurring amino acid except Pro or Gly
  SITE (381)..(381): Xaa can be any naturally occurring amino acid except Pro or Gly
  SITE (382)..(382): Xaa can be any naturally occurring amino acid except Pro or Gly
  SITE (384)..(384): Xaa can be any naturally occurring amino acid
  SITE (385)..(385): Xaa can be any naturally occurring amino acid
  SITE (386)..(386): Xaa can be any naturally occurring amino acid
  SITE (388)..(388): Xaa can be any naturally occurring amino acid except Pro or Gly
  SITE (389)..(389): Xaa can be any naturally occurring amino acid except Pro or Gly
  SITE (390)..(390): Xaa can be any naturally occurring amino acid except Pro or Gly
  SITE (392)..(392): Xaa can be any naturally occurring amino acid
  SITE (393)..(393): Xaa can be any naturally occurring amino acid
  SITE (394)..(394): Xaa can be any naturally occurring amino acid
  SITE (396)..(396): Xaa can be any naturally occurring amino acid except Pro or Gly
  SITE (397)..(397): Xaa can be any naturally occurring amino acid except Pro or Gly
  SITE (398)..(398): Xaa can be any naturally occurring amino acid except Pro or Gly
  SITE (400)..(400): Xaa can be any naturally occurring amino acid
  SITE (401)..(401): Xaa can be any naturally occurring amino acid
  SITE (402)..(402): Xaa can be any naturally occurring amino acid
  SITE (404)..(404): Xaa can be any naturally occurring amino acid except Pro or Gly
  SITE (405)..(405): Xaa can be any naturally occurring amino acid except Pro or Gly
  SITE (406)..(406): Xaa can be any naturally occurring amino acid except Pro or Gly
  SITE (408)..(408): Xaa can be any naturally occurring amino acid
  SITE (409)..(409): Xaa can be any naturally occurring amino acid
  SITE (410)..(410): Xaa can be any naturally occurring amino acid
  SITE (412)..(412): Xaa can be any naturally occurring amino acid except Pro or Gly
  SITE (413)..(413): Xaa can be any naturally occurring amino acid except Pro or Gly
  SITE (414)..(414): Xaa can be any naturally occurring amino acid except Pro or Gly
  SITE (416)..(416): Xaa can be any naturally occurring amino acid
  SITE (417)..(417): Xaa can be any naturally occurring amino acid
  SITE (418)..(418): Xaa can be any naturally occurring amino acid
  SITE (420)..(420): Xaa can be any naturally occurring amino acid except Pro or Gly
  SITE (421)..(421): Xaa can be any naturally occurring amino acid except Pro or Gly
  SITE (422)..(422): Xaa can be any naturally occurring amino acid except Pro or Gly
  SITE (424)..(424): Xaa can be any naturally occurring amino acid
  SITE (425)..(425): Xaa can be any naturally occurring amino acid
  SITE (426)..(426): Xaa can be any naturally occurring amino acid
  SITE (428)..(428): Xaa can be any naturally occurring amino acid except Pro or Gly
  SITE (429)..(429): Xaa can be any naturally occurring amino acid except Pro or Gly
  SITE (430)..(430): Xaa can be any naturally occurring amino acid except Pro or Gly
  SITE (432)..(432): Xaa can be any naturally occurring amino acid
  SITE (433)..(433): Xaa can be any naturally occurring amino acid
  SITE (434)..(434): Xaa can be any naturally occurring amino acid
  SITE (436)..(436): Xaa can be any naturally occurring amino acid except Pro or Gly
  SITE (437)..(437): Xaa can be any naturally occurring amino acid except Pro or Gly
  SITE (438)..(438): Xaa can be any naturally occurring amino acid except Pro or Gly
  SITE (440)..(440): Xaa can be any naturally occurring amino acid
  SITE (441)..(441): Xaa can be any naturally occurring amino acid
  SITE (442)..(442): Xaa can be any naturally occurring amino acid
  SITE (444)..(444): Xaa can be any naturally occurring amino acid except Pro or Gly
  SITE (445)..(445): Xaa can be any naturally occurring amino acid except Pro or Gly
  SITE (446)..(446): Xaa can be any naturally occurring amino acid except Pro or Gly
  SITE (448)..(448): Xaa can be any naturally occurring amino acid
  SITE (449)..(449): Xaa can be any naturally occurring amino acid
  SITE (450)..(450): Xaa can be any naturally occurring amino acid
  SITE (452)..(452): Xaa can be any naturally occurring amino acid except Pro or Gly
  SITE (453)..(453): Xaa can be any naturally occurring amino acid except Pro or Gly
  SITE (454)..(454): Xaa can be any naturally occurring amino acid except Pro or Gly
  SITE (456)..(456): Xaa can be any naturally occurring amino acid
  SITE (457)..(457): Xaa can be any naturally occurring amino acid
  SITE (458)..(458): Xaa can be any naturally occurring amino acid
  SITE (460)..(460): Xaa can be any naturally occurring amino acid except Pro or Gly
  SITE (461)..(461): Xaa can be any naturally occurring amino acid except Pro or Gly
  SITE (462)..(462): Xaa can be any naturally occurring amino acid except Pro or Gly
  SITE (464)..(464): Xaa can be any naturally occurring amino acid
  SITE (465)..(465): Xaa can be any naturally occurring amino acid
  SITE (466)..(466): Xaa can be any naturally occurring amino acid
  SITE (468)..(468): Xaa can be any naturally occurring amino acid except Pro or Gly
  SITE (469)..(469): Xaa can be any naturally occurring amino acid except Pro or Gly
  SITE (470)..(470): Xaa can be any naturally occurring amino acid except Pro or Gly
  SITE (472)..(472): Xaa can be any naturally occurring amino acid
  SITE (473)..(473): Xaa can be any naturally occurring amino acid
  SITE (474)..(474): Xaa can be any naturally occurring amino acid
  SITE (476)..(476): Xaa can be any naturally occurring amino acid except Pro or Gly
  SITE (477)..(477): Xaa can be any naturally occurring amino acid except Pro or Gly
  SITE (478)..(478): Xaa can be any naturally occurring amino acid except Pro or Gly
  SITE (480)..(480): Xaa can be any naturally occurring amino acid
  SITE (481)..(481): Xaa can be any naturally occurring amino acid
  SITE (482)..(482): Xaa can be any naturally occurring amino acid
  SITE (484)..(484): Xaa can be any naturally occurring amino acid except Pro or Gly
  SITE (485)..(485): Xaa can be any naturally occurring amino acid except Pro or Gly
  SITE (486)..(486): Xaa can be any naturally occurring amino acid except Pro or Gly
  SITE (488)..(488): Xaa can be any naturally occurring amino acid
  SITE (489)..(489): Xaa can be any naturally occurring amino acid
  SITE (490)..(490): Xaa can be any naturally occurring amino acid
  SITE (492)..(492): Xaa can be any naturally occurring amino acid except Pro or Gly
  SITE (493)..(493): Xaa can be any naturally occurring amino acid except Pro or Gly
  SITE (494)..(494): Xaa can be any naturally occurring amino acid except Pro or Gly
  SITE (496)..(496): Xaa can be any naturally occurring amino acid
  SITE (497)..(497): Xaa can be any naturally occurring amino acid
  SITE (498)..(498): Xaa can be any naturally occurring amino acid
  SITE (500)..(500): Xaa can be any naturally occurring amino acid except Pro or Gly
  SITE (501)..(501): Xaa can be any naturally occurring amino acid except Pro or Gly
  SITE (502)..(502): Xaa can be any naturally occurring amino acid except Pro or Gly
  SITE (504)..(504): Xaa can be any naturally occurring amino acid
  SITE (505)..(505): Xaa can be any naturally occurring amino acid
  SITE (506)..(506): Xaa can be any naturally occurring amino acid
  SITE (508)..(508): Xaa can be any naturally occurring amino acid except Pro or Gly
  SITE (509)..(509): Xaa can be any naturally occurring amino acid except Pro or Gly
  SITE (510)..(510): Xaa can be any naturally occurring amino acid except Pro or Gly
  SITE (512)..(512): Xaa can be any naturally occurring amino acid
  SITE (513)..(513): Xaa can be any naturally occurring amino acid
  SITE (514)..(514): Xaa can be any naturally occurring amino acid
  SITE (516)..(516): Xaa can be any naturally occurring amino acid except Pro or Gly
  SITE (517)..(517): Xaa can be any naturally occurring amino acid except Pro or Gly
  SITE (518)..(518): Xaa can be any naturally occurring amino acid except Pro or Gly
  SITE (520)..(520): Xaa can be any naturally occurring amino acid
  SITE (521)..(521): Xaa can be any naturally occurring amino acid
  SITE (522)..(522): Xaa can be any naturally occurring amino acid
  SITE (524)..(524): Xaa can be any naturally occurring amino acid except Pro or Gly
  SITE (525)..(525): Xaa can be any naturally occurring amino acid except Pro or Gly
  SITE (526)..(526): Xaa can be any naturally occurring amino acid except Pro or Gly
  SITE (528)..(528): Xaa can be any naturally occurring amino acid
  SITE (529)..(529): Xaa can be any naturally occurring amino acid
  SITE (530)..(530): Xaa can be any naturally occurring amino acid
  SITE (532)..(532): Xaa can be any naturally occurring amino acid except Pro or Gly
  SITE (533)..(533): Xaa can be any naturally occurring amino acid except Pro or Gly
  SITE (534)..(534): Xaa can be any naturally occurring amino acid except Pro or Gly
  SITE (536)..(536): Xaa can be any naturally occurring amino acid
  SITE (537)..(537): Xaa can be any naturally occurring amino acid
  SITE (538)..(538): Xaa can be any naturally occurring amino acid
  SITE (540)..(540): Xaa can be any naturally occurring amino acid except Pro or Gly
  SITE (541)..(541): Xaa can be any naturally occurring amino acid except Pro or Gly
  SITE (542)..(542): Xaa can be any naturally occurring amino acid except Pro or Gly
  SITE (544)..(544): Xaa can be any naturally occurring amino acid
  SITE (545)..(545): Xaa can be any naturally occurring amino acid
  SITE (546)..(546): Xaa can be any naturally occurring amino acid
  SITE (548)..(548): Xaa can be any naturally occurring amino acid except Pro or Gly
  SITE (549)..(549): Xaa can be any naturally occurring amino acid except Pro or Gly
  SITE (550)..(550): Xaa can be any naturally occurring amino acid except Pro or Gly
  SITE (552)..(552): Xaa can be any naturally occurring amino acid
  SITE (553)..(553): Xaa can be any naturally occurring amino acid
  SITE (554)..(554): Xaa can be any naturally occurring amino acid
  SITE (556)..(556): Xaa can be any naturally occurring amino acid except Pro or Gly
  SITE (557)..(557): Xaa can be any naturally occurring amino acid except Pro or Gly
  SITE (558)..(558): Xaa can be any naturally occurring amino acid except Pro or Gly
  SITE (560)..(560): Xaa can be any naturally occurring amino acid
  SITE (561)..(561): Xaa can be any naturally occurring amino acid
  SITE (562)..(562): Xaa can be any naturally occurring amino acid
  SITE (564)..(564): Xaa can be any naturally occurring amino acid except Pro or Gly
  SITE (565)..(565): Xaa can be any naturally occurring amino acid except Pro or Gly
  SITE (566)..(566): Xaa can be any naturally occurring amino acid except Pro or Gly
  SITE (568)..(568): Xaa can be any naturally occurring amino acid
  SITE (569)..(569): Xaa can be any naturally occurring amino acid
  SITE (570)..(570): Xaa can be any naturally occurring amino acid
  SITE (572)..(572): Xaa can be any naturally occurring amino acid except Pro or Gly
  SITE (573)..(573): Xaa can be any naturally occurring amino acid except Pro or Gly
  SITE (574)..(574): Xaa can be any naturally occurring amino acid except Pro or Gly
  SITE (576)..(576): Xaa can be any naturally occurring amino acid
  SITE (577)..(577): Xaa can be any naturally occurring amino acid
  SITE (578)..(578): Xaa can be any naturally occurring amino acid
  SITE (580)..(580): Xaa can be any naturally occurring amino acid except Pro or Gly
  SITE (581)..(581): Xaa can be any naturally occurring amino acid except Pro or Gly
  SITE (582)..(582): Xaa can be any naturally occurring amino acid except Pro or Gly
  SITE (584)..(584): Xaa can be any naturally occurring amino acid
  SITE (585)..(585): Xaa can be any naturally occurring amino acid
  SITE (586)..(586): Xaa can be any naturally occurring amino acid
  SITE (588)..(588): Xaa can be any naturally occurring amino acid except Pro or Gly
  SITE (589)..(589): Xaa can be any naturally occurring amino acid except Pro or Gly
  SITE (590)..(590): Xaa can be any naturally occurring amino acid except Pro or Gly
  SITE (592)..(592): Xaa can be any naturally occurring amino acid
  SITE (593)..(593): Xaa can be any naturally occurring amino acid
  SITE (594)..(594): Xaa can be any naturally occurring amino acid
  SITE (596)..(596): Xaa can be any naturally occurring amino acid except Pro or Gly
  SITE (597)..(597): Xaa can be any naturally occurring amino acid except Pro or Gly
  SITE (598)..(598): Xaa can be any naturally occurring amino acid except Pro or Gly
  SITE (600)..(600): Xaa can be any naturally occurring amino acid
  SITE (601)..(601): Xaa can be any naturally occurring amino acid
  SITE (602)..(602): Xaa can be any naturally occurring amino acid
  SITE (604)..(604): Xaa can be any naturally occurring amino acid except Pro or Gly
  SITE (605)..(605): Xaa can be any naturally occurring amino acid except Pro or Gly
  SITE (606)..(606): Xaa can be any naturally occurring amino acid except Pro or Gly
  SITE (608)..(608): Xaa can be any naturally occurring amino acid
  SITE (609)..(609): Xaa can be any naturally occurring amino acid
  SITE (610)..(610): Xaa can be any naturally occurring amino acid
  SITE (612)..(612): Xaa can be any naturally occurring amino acid except Pro or Gly
  SITE (613)..(613): Xaa can be any naturally occurring amino acid except Pro or Gly
  SITE (614)..(614): Xaa can be any naturally occurring amino acid except Pro or Gly
  SITE (616)..(616): Xaa can be any naturally occurring amino acid
  SITE (617)..(617): Xaa can be any naturally occurring amino acid
  SITE (618)..(618): Xaa can be any naturally occurring amino acid
  SITE (620)..(620): Xaa can be any naturally occurring amino acid except Pro or Gly
  SITE (621)..(621): Xaa can be any naturally occurring amino acid except Pro or Gly
  SITE (622)..(622): Xaa can be any naturally occurring amino acid except Pro or Gly
  SITE (624)..(624): Xaa can be any naturally occurring amino acid
  SITE (625)..(625): Xaa can be any naturally occurring amino acid
  SITE (626)..(626): Xaa can be any naturally occurring amino acid
  SITE (628)..(628): Xaa can be any naturally occurring amino acid except Pro or Gly
  SITE (629)..(629): Xaa can be any naturally occurring amino acid except Pro or Gly
  SITE (630)..(630): Xaa can be any naturally occurring amino acid except Pro or Gly
  SITE (632)..(632): Xaa can be any naturally occurring amino acid
  SITE (633)..(633): Xaa can be any naturally occurring amino acid
  SITE (634)..(634): Xaa can be any naturally occurring amino acid
  SITE (636)..(636): Xaa can be any naturally occurring amino acid except Pro or Gly
  SITE (637)..(637): Xaa can be any naturally occurring amino acid except Pro or Gly
  SITE (638)..(638): Xaa can be any naturally occurring amino acid except Pro or Gly
  SITE (640)..(640): Xaa can be any naturally occurring amino acid
  SITE (641)..(641): Xaa can be any naturally occurring amino acid
  SITE (642)..(642): Xaa can be any naturally occurring amino acid
  SITE (644)..(644): Xaa can be any naturally occurring amino acid except Pro or Gly
  SITE (645)..(645): Xaa can be any naturally occurring amino acid except Pro or Gly
  SITE (646)..(646): Xaa can be any naturally occurring amino acid except Pro or Gly
  SITE (648)..(648): Xaa can be any naturally occurring amino acid
  SITE (649)..(649): Xaa can be any naturally occurring amino acid
  SITE (650)..(650): Xaa can be any naturally occurring amino acid
  SITE (652)..(652): Xaa can be any naturally occurring amino acid except Pro or Gly
  SITE (653)..(653): Xaa can be any naturally occurring amino acid except Pro or Gly
  SITE (654)..(654): Xaa can be any naturally occurring amino acid except Pro or Gly
  SITE (656)..(656): Xaa can be any naturally occurring amino acid
  SITE (657)..(657): Xaa can be any naturally occurring amino acid
  SITE (658)..(658): Xaa can be any naturally occurring amino acid
  SITE (660)..(660): Xaa can be any naturally occurring amino acid except Pro or Gly
  SITE (661)..(661): Xaa can be any naturally occurring amino acid except Pro or Gly
  SITE (662)..(662): Xaa can be any naturally occurring amino acid except Pro or Gly
  SITE (664)..(664): Xaa can be any naturally occurring amino acid
  SITE (665)..(665): Xaa can be any naturally occurring amino acid
  SITE (666)..(666): Xaa can be any naturally occurring amino acid
  SITE (668)..(668): Xaa can be any naturally occurring amino acid except Pro or Gly
  SITE (669)..(669): Xaa can be any naturally occurring amino acid except Pro or Gly
  SITE (670)..(670): Xaa can be any naturally occurring amino acid except Pro or Gly
  SITE (672)..(672): Xaa can be any naturally occurring amino acid
  SITE (673)..(673): Xaa can be any naturally occurring amino acid
  SITE (674)..(674): Xaa can be any naturally occurring amino acid
  SITE (676)..(676): Xaa can be any naturally occurring amino acid except Pro or Gly
  SITE (677)..(677): Xaa can be any naturally occurring amino acid except Pro or Gly
  SITE (678)..(678): Xaa can be any naturally occurring amino acid except Pro or Gly
  SITE (680)..(680): Xaa can be any naturally occurring amino acid
  SITE (681)..(681): Xaa can be any naturally occurring amino acid
  SITE (682)..(682): Xaa can be any naturally occurring amino acid
  SITE (684)..(684): Xaa can be any naturally occurring amino acid except Pro or Gly
  SITE (685)..(685): Xaa can be any naturally occurring amino acid except Pro or Gly
  SITE (686)..(686): Xaa can be any naturally occurring amino acid except Pro or Gly
  SITE (688)..(688): Xaa can be any naturally occurring amino acid
  SITE (689)..(689): Xaa can be any naturally occurring amino acid
  SITE (690)..(690): Xaa can be any naturally occurring amino acid
  SITE (692)..(692): Xaa can be any naturally occurring amino acid except Pro or Gly
  SITE (693)..(693): Xaa can be any naturally occurring amino acid except Pro or Gly
  SITE (694)..(694): Xaa can be any naturally occurring amino acid except Pro or Gly
  SITE (696)..(696): Xaa can be any naturally occurring amino acid
  SITE (697)..(697): Xaa can be any naturally occurring amino acid
  SITE (698)..(698): Xaa can be any naturally occurring amino acid
  SITE (700)..(700): Xaa can be any naturally occurring amino acid except Pro or Gly
  SITE (701)..(701): Xaa can be any naturally occurring amino acid except Pro or Gly
  SITE (702)..(702): Xaa can be any naturally occurring amino acid except Pro or Gly
  SITE (704)..(704): Xaa can be any naturally occurring amino acid
  SITE (705)..(705): Xaa can be any naturally occurring amino acid
  SITE (706)..(706): Xaa can be any naturally occurring amino acid
  SITE (708)..(708): Xaa can be any naturally occurring amino acid except Pro or Gly
  SITE (709)..(709): Xaa can be any naturally occurring amino acid except Pro or Gly
  SITE (710)..(710): Xaa can be any naturally occurring amino acid except Pro or Gly
  SITE (712)..(712): Xaa can be any naturally occurring amino acid
  SITE (713)..(713): Xaa can be any naturally occurring amino acid
  SITE (714)..(714): Xaa can be any naturally occurring amino acid
  SITE (716)..(716): Xaa can be any naturally occurring amino acid except Pro or Gly
  SITE (717)..(717): Xaa can be any naturally occurring amino acid except Pro or Gly
  SITE (718)..(718): Xaa can be any naturally occurring amino acid except Pro or Gly
  SITE (720)..(720): Xaa can be any naturally occurring amino acid
  SITE (721)..(721): Xaa can be any naturally occurring amino acid
  SITE (722)..(722): Xaa can be any naturally occurring amino acid
  SITE (724)..(724): Xaa can be any naturally occurring amino acid except Pro or Gly
  SITE (725)..(725): Xaa can be any naturally occurring amino acid except Pro or Gly
  SITE (726)..(726): Xaa can be any naturally occurring amino acid except Pro or Gly
  SITE (728)..(728): Xaa can be any naturally occurring amino acid
  SITE (729)..(729): Xaa can be any naturally occurring amino acid
  SITE (730)..(730): Xaa can be any naturally occurring amino acid
  SITE (732)..(732): Xaa can be any naturally occurring amino acid except Pro or Gly
  SITE (733)..(733): Xaa can be any naturally occurring amino acid except Pro or Gly
  SITE (734)..(734): Xaa can be any naturally occurring amino acid except Pro or Gly
  SITE (736)..(736): Xaa can be any naturally occurring amino acid
  SITE (737)..(737): Xaa can be any naturally occurring amino acid
  SITE (738)..(738): Xaa can be any naturally occurring amino acid
  SITE (740)..(740): Xaa can be any naturally occurring amino acid except Pro or Gly
  SITE (741)..(741): Xaa can be any naturally occurring amino acid except Pro or Gly
  SITE (742)..(742): Xaa can be any naturally occurring amino acid except Pro or Gly
  SITE (744)..(744): Xaa can be any naturally occurring amino acid
  SITE (745)..(745): Xaa can be any naturally occurring amino acid
  SITE (746)..(746): Xaa can be any naturally occurring amino acid
  SITE (748)..(748): Xaa can be any naturally occurring amino acid except Pro or Gly
  SITE (749)..(749): Xaa can be any naturally occurring amino acid except Pro or Gly
  SITE (750)..(750): Xaa can be any naturally occurring amino acid except Pro or Gly
  SITE (752)..(752): Xaa can be any naturally occurring amino acid
  SITE (753)..(753): Xaa can be any naturally occurring amino acid
  SITE (754)..(754): Xaa can be any naturally occurring amino acid
  SITE (756)..(756): Xaa can be any naturally occurring amino acid except Pro or Gly
  SITE (757)..(757): Xaa can be any naturally occurring amino acid except Pro or Gly
  SITE (758)..(758): Xaa can be any naturally occurring amino acid except Pro or Gly
  SITE (760)..(760): Xaa can be any naturally occurring amino acid
  SITE (761)..(761): Xaa can be any naturally occurring amino acid
  SITE (762)..(762): Xaa can be any naturally occurring amino acid
  SITE (764)..(764): Xaa can be any naturally occurring amino acid except Pro or Gly
  SITE (765)..(765): Xaa can be any naturally occurring amino acid except Pro or Gly
  SITE (766)..(766): Xaa can be any naturally occurring amino acid except Pro or Gly
  SITE (768)..(768): Xaa can be any naturally occurring amino acid
  SITE (769)..(769): Xaa can be any naturally occurring amino acid
  SITE (770)..(770): Xaa can be any naturally occurring amino acid
  SITE (772)..(772): Xaa can be any naturally occurring amino acid except Pro or Gly
  SITE (773)..(773): Xaa can be any naturally occurring amino acid except Pro or Gly
  SITE (774)..(774): Xaa can be any naturally occurring amino acid except Pro or Gly
  SITE (776)..(776): Xaa can be any naturally occurring amino acid
  SITE (777)..(777): Xaa can be any naturally occurring amino acid
  SITE (778)..(778): Xaa can be any naturally occurring amino acid
  SITE (780)..(780): Xaa can be any naturally occurring amino acid except Pro or Gly
  SITE (781)..(781): Xaa can be any naturally occurring amino acid except Pro or Gly
  SITE (782)..(782): Xaa can be any naturally occurring amino acid except Pro or Gly
  SITE (784)..(784): Xaa can be any naturally occurring amino acid
  SITE (785)..(785): Xaa can be any naturally occurring amino acid
  SITE (786)..(786): Xaa can be any naturally occurring amino acid
  SITE (788)..(788): Xaa can be any naturally occurring amino acid except Pro or Gly
  SITE (789)..(789): Xaa can be any naturally occurring amino acid except Pro or Gly
  SITE (790)..(790): Xaa can be any naturally occurring amino acid except Pro or Gly
  SITE (792)..(792): Xaa can be any naturally occurring amino acid
  SITE (793)..(793): Xaa can be any naturally occurring amino acid
  SITE (794)..(794): Xaa can be any naturally occurring amino acid
  SITE (796)..(796): Xaa can be any naturally occurring amino acid except Pro or Gly
  SITE (797)..(797): Xaa can be any naturally occurring amino acid except Pro or Gly
  SITE (798)..(798): Xaa can be any naturally occurring amino acid except Pro or Gly
  SITE (800)..(800): Xaa can be any naturally occurring amino acid
  SITE (801)..(801): Xaa can be any naturally occurring amino acid
  SITE (802)..(802): Xaa can be any naturally occurring amino acid
  SITE (804)..(804): Xaa can be any naturally occurring amino acid except Pro or Gly
  SITE (805)..(805): Xaa can be any naturally occurring amino acid except Pro or Gly
  SITE (806)..(806): Xaa can be any naturally occurring amino acid except Pro or Gly
  SITE (808)..(808): Xaa can be any naturally occurring amino acid
  SITE (809)..(809): Xaa can be any naturally occurring amino acid
  SITE (810)..(810): Xaa can be any naturally occurring amino acid
  SITE (812)..(812): Xaa can be any naturally occurring amino acid except Pro or Gly
  SITE (813)..(813): Xaa can be any naturally occurring amino acid except Pro or Gly
  SITE (814)..(814): Xaa can be any naturally occurring amino acid except Pro or Gly
  SITE (816)..(816): Xaa can be any naturally occurring amino acid
  SITE (817)..(817): Xaa can be any naturally occurring amino acid
  SITE (818)..(818): Xaa can be any naturally occurring amino acid
  SITE (820)..(820): Xaa can be any naturally occurring amino acid except Pro or Gly
  SITE (821)..(821): Xaa can be any naturally occurring amino acid except Pro or Gly
  SITE (822)..(822): Xaa can be any naturally occurring amino acid except Pro or Gly
  SITE (824)..(824): Xaa can be any naturally occurring amino acid
  SITE (825)..(825): Xaa can be any naturally occurring amino acid
  SITE (826)..(826): Xaa can be any naturally occurring amino acid
  SITE (828)..(828): Xaa can be any naturally occurring amino acid except Pro or Gly
  SITE (829)..(829): Xaa can be any naturally occurring amino acid except Pro or Gly
  SITE (830)..(830): Xaa can be any naturally occurring amino acid except Pro or Gly
  SITE (832)..(832): Xaa can be any naturally occurring amino acid
  SITE (833)..(833): Xaa can be any naturally occurring amino acid
  SITE (834)..(834): Xaa can be any naturally occurring amino acid
  SITE (836)..(836): Xaa can be any naturally occurring amino acid except Pro or Gly
  SITE (837)..(837): Xaa can be any naturally occurring amino acid except Pro or Gly
  SITE (838)..(838): Xaa can be any naturally occurring amino acid except Pro or Gly
  SITE (840)..(840): Xaa can be any naturally occurring amino acid
  SITE (841)..(841): Xaa can be any naturally occurring amino acid
  SITE (842)..(842): Xaa can be any naturally occurring amino acid
  SITE (844)..(844): Xaa can be any naturally occurring amino acid except Pro or Gly
  SITE (845)..(845): Xaa can be any naturally occurring amino acid except Pro or Gly
  SITE (846)..(846): Xaa can be any naturally occurring amino acid except Pro or Gly
  SITE (848)..(848): Xaa can be any naturally occurring amino acid
  SITE (849)..(849): Xaa can be any naturally occurring amino acid
  SITE (850)..(850): Xaa can be any naturally occurring amino acid
  SITE (852)..(852): Xaa can be any naturally occurring amino acid except Pro or Gly
  SITE (853)..(853): Xaa can be any naturally occurring amino acid except Pro or Gly
  SITE (854)..(854): Xaa can be any naturally occurring amino acid except Pro or Gly
  SITE (856)..(856): Xaa can be any naturally occurring amino acid
  SITE (857)..(857): Xaa can be any naturally occurring amino acid
  SITE (858)..(858): Xaa can be any naturally occurring amino acid
  SITE (860)..(860): Xaa can be any naturally occurring amino acid except Pro or Gly
  SITE (861)..(861): Xaa can be any naturally occurring amino acid except Pro or Gly
  SITE (862)..(862): Xaa can be any naturally occurring amino acid except Pro or Gly
  SITE (864)..(864): Xaa can be any naturally occurring amino acid
  SITE (865)..(865): Xaa can be any naturally occurring amino acid
  SITE (866)..(866): Xaa can be any naturally occurring amino acid
  SITE (868)..(868): Xaa can be any naturally occurring amino acid except Pro or Gly
  SITE (869)..(869): Xaa can be any naturally occurring amino acid except Pro or Gly
  SITE (870)..(870): Xaa can be any naturally occurring amino acid except Pro or Gly
  SITE (872)..(872): Xaa can be any naturally occurring amino acid
  SITE (873)..(873): Xaa can be any naturally occurring amino acid
  SITE (874)..(874): Xaa can be any naturally occurring amino acid
  SITE (876)..(876): Xaa can be any naturally occurring amino acid except Pro or Gly
  SITE (877)..(877): Xaa can be any naturally occurring amino acid except Pro or Gly
  SITE (878)..(878): Xaa can be any naturally occurring amino acid except Pro or Gly
  SITE (880)..(880): Xaa can be any naturally occurring amino acid
  SITE (881)..(881): Xaa can be any naturally occurring amino acid
  SITE (882)..(882): Xaa can be any naturally occurring amino acid
  SITE (884)..(884): Xaa can be any naturally occurring amino acid except Pro or Gly
  SITE (885)..(885): Xaa can be any naturally occurring amino acid except Pro or Gly
  SITE (886)..(886): Xaa can be any naturally occurring amino acid except Pro or Gly
  SITE (888)..(888): Xaa can be any naturally occurring amino acid
  SITE (889)..(889): Xaa can be any naturally occurring amino acid
  SITE (890)..(890): Xaa can be any naturally occurring amino acid
  SITE (892)..(892): Xaa can be any naturally occurring amino acid except Pro or Gly
  SITE (893)..(893): Xaa can be any naturally occurring amino acid except Pro or Gly
  SITE (894)..(894): Xaa can be any naturally occurring amino acid except Pro or Gly
  SITE (896)..(896): Xaa can be any naturally occurring amino acid
  SITE (897)..(897): Xaa can be any naturally occurring amino acid
  SITE (898)..(898): Xaa can be any naturally occurring amino acid
  SITE (900)..(900): Xaa can be any naturally occurring amino acid except Pro or Gly
  SITE (901)..(901): Xaa can be any naturally occurring amino acid except Pro or Gly
  SITE (902)..(902): Xaa can be any naturally occurring amino acid except Pro or Gly
  SITE (904)..(904): Xaa can be any naturally occurring amino acid
  SITE (905)..(905): Xaa can be any naturally occurring amino acid
  SITE (906)..(906): Xaa can be any naturally occurring amino acid
  SITE (908)..(908): Xaa can be any naturally occurring amino acid except Pro or Gly
  SITE (909)..(909): Xaa can be any naturally occurring amino acid except Pro or Gly
  SITE (910)..(910): Xaa can be any naturally occurring amino acid except Pro or Gly
  SITE (912)..(912): Xaa can be any naturally occurring amino acid
  SITE (913)..(913): Xaa can be any naturally occurring amino acid
  SITE (914)..(914): Xaa can be any naturally occurring amino acid
  SITE (916)..(916): Xaa can be any naturally occurring amino acid except Pro or Gly
  SITE (917)..(917): Xaa can be any naturally occurring amino acid except Pro or Gly
  SITE (918)..(918): Xaa can be any naturally occurring amino acid except Pro or Gly
  SITE (920)..(920): Xaa can be any naturally occurring amino acid
  SITE (921)..(921): Xaa can be any naturally occurring amino acid
  SITE (922)..(922): Xaa can be any naturally occurring amino acid
  SITE (924)..(924): Xaa can be any naturally occurring amino acid except Pro or Gly
  SITE (925)..(925): Xaa can be any naturally occurring amino acid except Pro or Gly
  SITE (926)..(926): Xaa can be any naturally occurring amino acid except Pro or Gly
  SITE (928)..(928): Xaa can be any naturally occurring amino acid
  SITE (929)..(929): Xaa can be any naturally occurring amino acid
  SITE (930)..(930): Xaa can be any naturally occurring amino acid
  SITE (932)..(932): Xaa can be any naturally occurring amino acid except Pro or Gly
  SITE (933)..(933): Xaa can be any naturally occurring amino acid except Pro or Gly
  SITE (934)..(934): Xaa can be any naturally occurring amino acid except Pro or Gly
  SITE (936)..(936): Xaa can be any naturally occurring amino acid
  SITE (937)..(937): Xaa can be any naturally occurring amino acid
  SITE (938)..(938): Xaa can be any naturally occurring amino acid
  SITE (940)..(940): Xaa can be any naturally occurring amino acid except Pro or Gly
  SITE (941)..(941): Xaa can be any naturally occurring amino acid except Pro or Gly
  SITE (942)..(942): Xaa can be any naturally occurring amino acid except Pro or Gly
  SITE (944)..(944): Xaa can be any naturally occurring amino acid
  SITE (945)..(945): Xaa can be any naturally occurring amino acid
  SITE (946)..(946): Xaa can be any naturally occurring amino acid
  SITE (948)..(948): Xaa can be any naturally occurring amino acid except Pro or Gly
  SITE (949)..(949): Xaa can be any naturally occurring amino acid except Pro or Gly
  SITE (950)..(950): Xaa can be any naturally occurring amino acid except Pro or Gly
  SITE (952)..(952): Xaa can be any naturally occurring amino acid
  SITE (953)..(953): Xaa can be any naturally occurring amino acid
  SITE (954)..(954): Xaa can be any naturally occurring amino acid
  SITE (956)..(956): Xaa can be any naturally occurring amino acid except Pro or Gly
  SITE (957)..(957): Xaa can be any naturally occurring amino acid except Pro or Gly
  SITE (958)..(958): Xaa can be any naturally occurring amino acid except Pro or Gly
  SITE (960)..(960): Xaa can be any naturally occurring amino acid
  SITE (961)..(961): Xaa can be any naturally occurring amino acid
  SITE (962)..(962): Xaa can be any naturally occurring amino acid
  SITE (964)..(964): Xaa can be any naturally occurring amino acid except Pro or Gly
  SITE (965)..(965): Xaa can be any naturally occurring amino acid except Pro or Gly
  SITE (966)..(966): Xaa can be any naturally occurring amino acid except Pro or Gly
  SITE (968)..(968): Xaa can be any naturally occurring amino acid
  SITE (969)..(969): Xaa can be any naturally occurring amino acid
  SITE (970)..(970): Xaa can be any naturally occurring amino acid
  SITE (972)..(972): Xaa can be any naturally occurring amino acid except Pro or Gly
  SITE (973)..(973): Xaa can be any naturally occurring amino acid except Pro or Gly
  SITE (974)..(974): Xaa can be any naturally occurring amino acid except Pro or Gly
  SITE (976)..(976): Xaa can be any naturally occurring amino acid
  SITE (977)..(977): Xaa can be any naturally occurring amino acid
  SITE (978)..(978): Xaa can be any naturally occurring amino acid
  SITE (980)..(980): Xaa can be any naturally occurring amino acid except Pro or Gly
  SITE (981)..(981): Xaa can be any naturally occurring amino acid except Pro or Gly
  SITE (982)..(982): Xaa can be any naturally occurring amino acid except Pro or Gly
  SITE (984)..(984): Xaa can be any naturally occurring amino acid
  SITE (985)..(985): Xaa can be any naturally occurring amino acid
  SITE (986)..(986): Xaa can be any naturally occurring amino acid
  SITE (988)..(988): Xaa can be any naturally occurring amino acid except Pro or Gly
  SITE (989)..(989): Xaa can be any naturally occurring amino acid except Pro or Gly
  SITE (990)..(990): Xaa can be any naturally occurring amino acid except Pro or Gly
  SITE (992)..(992): Xaa can be any naturally occurring amino acid
  SITE (993)..(993): Xaa can be any naturally occurring amino acid
  SITE (994)..(994): Xaa can be any naturally occurring amino acid
  SITE (996)..(996): Xaa can be any naturally occurring amino acid except Pro or Gly
  SITE (997)..(997): Xaa can be any naturally occurring amino acid except Pro or Gly
  SITE (998)..(998): Xaa can be any naturally occurring amino acid except Pro or Gly
  SITE (1000)..(1000): Xaa can be any naturally occurring amino acid
  SITE (1001)..(1001): Xaa can be any naturally occurring amino acid
  SITE (1002)..(1002): Xaa can be any naturally occurring amino acid
  SITE (1004)..(1004): Xaa can be any naturally occurring amino acid except Pro or Gly
  SITE (1005)..(1005): Xaa can be any naturally occurring amino acid except Pro or Gly
  SITE (1006)..(1006): Xaa can be any naturally occurring amino acid except Pro or Gly
  SITE (1008)..(1008): Xaa can be any naturally occurring amino acid
  SITE (1009)..(1009): Xaa can be any naturally occurring amino acid
  SITE (1010)..(1010): Xaa can be any naturally occurring amino acid
  SITE (1012)..(1012): Xaa can be any naturally occurring amino acid except Pro or Gly
  SITE (1013)..(1013): Xaa can be any naturally occurring amino acid except Pro or Gly
  SITE (1014)..(1014): Xaa can be any naturally occurring amino acid except Pro or Gly
  SITE (1016)..(1016): Xaa can be any naturally occurring amino acid
  SITE (1017)..(1017): Xaa can be any naturally occurring amino acid
  SITE (1018)..(1018): Xaa can be any naturally occurring amino acid
  SITE (1020)..(1020): Xaa can be any naturally occurring amino acid except Pro or Gly
  SITE (1021)..(1021): Xaa can be any naturally occurring amino acid except Pro or Gly
  SITE (1022)..(1022): Xaa can be any naturally occurring amino acid except Pro or Gly
  SITE (1024)..(1024): Xaa can be any naturally occurring amino acid
  SITE (1025)..(1025): Xaa can be any naturally occurring amino acid
  SITE (1026)..(1026): Xaa can be any naturally occurring amino acid
  SITE (1028)..(1028): Xaa can be any naturally occurring amino acid except Pro or Gly
  SITE (1029)..(1029): Xaa can be any naturally occurring amino acid except Pro or Gly
  SITE (1030)..(1030): Xaa can be any naturally occurring amino acid except Pro or Gly
  SITE (1032)..(1032): Xaa can be any naturally occurring amino acid
  SITE (1033)..(1033): Xaa can be any naturally occurring amino acid
  SITE (1034)..(1034): Xaa can be any naturally occurring amino acid
  SITE (1036)..(1036): Xaa can be any naturally occurring amino acid except Pro or Gly
  SITE (1037)..(1037): Xaa can be any naturally occurring amino acid except Pro or Gly
  SITE (1038)..(1038): Xaa can be any naturally occurring amino acid except Pro or Gly
  SITE (1040)..(1040): Xaa can be any naturally occurring amino acid
  SITE (1041)..(1041): Xaa can be any naturally occurring amino acid
  SITE (1042)..(1042): Xaa can be any naturally occurring amino acid
  SITE (1044)..(1044): Xaa can be any naturally occurring amino acid except Pro or Gly
  SITE (1045)..(1045): Xaa can be any naturally occurring amino acid except Pro or Gly
  SITE (1046)..(1046): Xaa can be any naturally occurring amino acid except Pro or Gly
  SITE (1048)..(1048): Xaa can be any naturally occurring amino acid
  SITE (1049)..(1049): Xaa can be any naturally occurring amino acid
  SITE (1050)..(1050): Xaa can be any naturally occurring amino acid
  SITE (1052)..(1052): Xaa can be any naturally occurring amino acid except Pro or Gly
  SITE (1053)..(1053): Xaa can be any naturally occurring amino acid except Pro or Gly
  SITE (1054)..(1054): Xaa can be any naturally occurring amino acid except Pro or Gly
  SITE (1056)..(1056): Xaa can be any naturally occurring amino acid
  SITE (1057)..(1057): Xaa can be any naturally occurring amino acid
  SITE (1058)..(1058): Xaa can be any naturally occurring amino acid
  SITE (1060)..(1060): Xaa can be any naturally occurring amino acid except Pro or Gly
  SITE (1061)..(1061): Xaa can be any naturally occurring amino acid except Pro or Gly
  SITE (1062)..(1062): Xaa can be any naturally occurring amino acid except Pro or Gly
  SITE (1064)..(1064): Xaa can be any naturally occurring amino acid
  SITE (1065)..(1065): Xaa can be any naturally occurring amino acid
  SITE (1066)..(1066): Xaa can be any naturally occurring amino acid
  SITE (1068)..(1068): Xaa can be any naturally occurring amino acid except Pro or Gly
  SITE (1069)..(1069): Xaa can be any naturally occurring amino acid except Pro or Gly
  SITE (1070)..(1070): Xaa can be any naturally occurring amino acid except Pro or Gly
  SITE (1072)..(1072): Xaa can be any naturally occurring amino acid
  SITE (1073)..(1073): Xaa can be any naturally occurring amino acid
  SITE (1074)..(1074): Xaa can be any naturally occurring amino acid
  SITE (1076)..(1076): Xaa can be any naturally occurring amino acid except Pro or Gly
  SITE (1077)..(1077): Xaa can be any naturally occurring amino acid except Pro or Gly
  SITE (1078)..(1078): Xaa can be any naturally occurring amino acid except Pro or Gly
  SITE (1080)..(1080): Xaa can be any naturally occurring amino acid
  SITE (1081)..(1081): Xaa can be any naturally occurring amino acid
  SITE (1082)..(1082): Xaa can be any naturally occurring amino acid
  SITE (1084)..(1084): Xaa can be any naturally occurring amino acid except Pro or Gly
  SITE (1085)..(1085): Xaa can be any naturally occurring amino acid except Pro or Gly
  SITE (1086)..(1086): Xaa can be any naturally occurring amino acid except Pro or Gly
  SITE (1088)..(1088): Xaa can be any naturally occurring amino acid
  SITE (1089)..(1089): Xaa can be any naturally occurring amino acid
  SITE (1090)..(1090): Xaa can be any naturally occurring amino acid
  SITE (1092)..(1092): Xaa can be any naturally occurring amino acid except Pro or Gly
  SITE (1093)..(1093): Xaa can be any naturally occurring amino acid except Pro or Gly
  SITE (1094)..(1094): Xaa can be any naturally occurring amino acid except Pro or Gly
  SITE (1096)..(1096): Xaa can be any naturally occurring amino acid
  SITE (1097)..(1097): Xaa can be any naturally occurring amino acid
  SITE (1098)..(1098): Xaa can be any naturally occurring amino acid
  SITE (1100)..(1100): Xaa can be any naturally occurring amino acid except Pro or Gly
  SITE (1101)..(1101): Xaa can be any naturally occurring amino acid except Pro or Gly
  SITE (1102)..(1102): Xaa can be any naturally occurring amino acid except Pro or Gly
  SITE (1104)..(1104): Xaa can be any naturally occurring amino acid
  SITE (1105)..(1105): Xaa can be any naturally occurring amino acid
  SITE (1106)..(1106): Xaa can be any naturally occurring amino acid
  SITE (1108)..(1108): Xaa can be any naturally occurring amino acid except Pro or Gly
  SITE (1109)..(1109): Xaa can be any naturally occurring amino acid except Pro or Gly
  SITE (1110)..(1110): Xaa can be any naturally occurring amino acid except Pro or Gly
  SITE (1112)..(1112): Xaa can be any naturally occurring amino acid
  SITE (1113)..(1113): Xaa can be any naturally occurring amino acid
  SITE (1114)..(1114): Xaa can be any naturally occurring amino acid
  SITE (1116)..(1116): Xaa can be any naturally occurring amino acid except Pro or Gly
  SITE (1117)..(1117): Xaa can be any naturally occurring amino acid except Pro or Gly
  SITE (1118)..(1118): Xaa can be any naturally occurring amino acid except Pro or Gly
  SITE (1120)..(1120): Xaa can be any naturally occurring amino acid
  SITE (1121)..(1121): Xaa can be any naturally occurring amino acid
  SITE (1122)..(1122): Xaa can be any naturally occurring amino acid
  SITE (1124)..(1124): Xaa can be any naturally occurring amino acid except Pro or Gly
  SITE (1125)..(1125): Xaa can be any naturally occurring amino acid except Pro or Gly
  SITE (1126)..(1126): Xaa can be any naturally occurring amino acid except Pro or Gly
  SITE (1128)..(1128): Xaa can be any naturally occurring amino acid
  SITE (1129)..(1129): Xaa can be any naturally occurring amino acid
  SITE (1130)..(1130): Xaa can be any naturally occurring amino acid
  SITE (1132)..(1132): Xaa can be any naturally occurring amino acid except Pro or Gly
  SITE (1133)..(1133): Xaa can be any naturally occurring amino acid except Pro or Gly
  SITE (1134)..(1134): Xaa can be any naturally occurring amino acid except Pro or Gly
  SITE (1136)..(1136): Xaa can be any naturally occurring amino acid
  SITE (1137)..(1137): Xaa can be any naturally occurring amino acid
  SITE (1138)..(1138): Xaa can be any naturally occurring amino acid
  SITE (1140)..(1140): Xaa can be any naturally occurring amino acid except Pro or Gly
  SITE (1141)..(1141): Xaa can be any naturally occurring amino acid except Pro or Gly
  SITE (1142)..(1142): Xaa can be any naturally occurring amino acid except Pro or Gly
  SITE (1144)..(1144): Xaa can be any naturally occurring amino acid
  SITE (1145)..(1145): Xaa can be any naturally occurring amino acid
  SITE (1146)..(1146): Xaa can be any naturally occurring amino acid
  SITE (1148)..(1148): Xaa can be any naturally occurring amino acid except Pro or Gly
  SITE (1149)..(1149): Xaa can be any naturally occurring amino acid except Pro or Gly
  SITE (1150)..(1150): Xaa can be any naturally occurring amino acid except Pro or Gly
  SITE (1152)..(1152): Xaa can be any naturally occurring amino acid
  SITE (1153)..(1153): Xaa can be any naturally occurring amino acid
  SITE (1154)..(1154): Xaa can be any naturally occurring amino acid
  SITE (1156)..(1156): Xaa can be any naturally occurring amino acid except Pro or Gly
  SITE (1157)..(1157): Xaa can be any naturally occurring amino acid except Pro or Gly
  SITE (1158)..(1158): Xaa can be any naturally occurring amino acid except Pro or Gly
  SITE (1160)..(1160): Xaa can be any naturally occurring amino acid
  SITE (1161)..(1161): Xaa can be any naturally occurring amino acid
  SITE (1162)..(1162): Xaa can be any naturally occurring amino acid
  SITE (1164)..(1164): Xaa can be any naturally occurring amino acid except Pro or Gly
  SITE (1165)..(1165): Xaa can be any naturally occurring amino acid except Pro or Gly
  SITE (1166)..(1166): Xaa can be any naturally occurring amino acid except Pro or Gly
  SITE (1168)..(1168): Xaa can be any naturally occurring amino acid
  SITE (1169)..(1169): Xaa can be any naturally occurring amino acid
  SITE (1170)..(1170): Xaa can be any naturally occurring amino acid
  SITE (1172)..(1172): Xaa can be any naturally occurring amino acid except Pro or Gly
  SITE (1173)..(1173): Xaa can be any naturally occurring amino acid except Pro or Gly
  SITE (1174)..(1174): Xaa can be any naturally occurring amino acid except Pro or Gly
  SITE (1176)..(1176): Xaa can be any naturally occurring amino acid
  SITE (1177)..(1177): Xaa can be any naturally occurring amino acid
  SITE (1178)..(1178): Xaa can be any naturally occurring amino acid
  SITE (1180)..(1180): Xaa can be any naturally occurring amino acid except Pro or Gly
  SITE (1181)..(1181): Xaa can be any naturally occurring amino acid except Pro or Gly
  SITE (1182)..(1182): Xaa can be any naturally occurring amino acid except Pro or Gly
  SITE (1184)..(1184): Xaa can be any naturally occurring amino acid
  SITE (1185)..(1185): Xaa can be any naturally occurring amino acid
  SITE (1186)..(1186): Xaa can be any naturally occurring amino acid
  SITE (1188)..(1188): Xaa can be any naturally occurring amino acid except Pro or Gly
  SITE (1189)..(1189): Xaa can be any naturally occurring amino acid except Pro or Gly
  SITE (1190)..(1190): Xaa can be any naturally occurring amino acid except Pro or Gly
  SITE (1192)..(1192): Xaa can be any naturally occurring amino acid
  SITE (1193)..(1193): Xaa can be any naturally occurring amino acid
  SITE (1194)..(1194): Xaa can be any naturally occurring amino acid
  SITE (1196)..(1196): Xaa can be any naturally occurring amino acid except Pro or Gly
  SITE (1197)..(1197): Xaa can be any naturally occurring amino acid except Pro or Gly
  SITE (1198)..(1198): Xaa can be any naturally occurring amino acid except Pro or Gly
  SITE (1200)..(1200): Xaa can be any naturally occurring amino acid
  SITE (1201)..(1201): Xaa can be any naturally occurring amino acid
  SITE (1202)..(1202): Xaa can be any naturally occurring amino acid
  SITE (1204)..(1204): Xaa can be any naturally occurring amino acid except Pro or Gly
  SITE (1205)..(1205): Xaa can be any naturally occurring amino acid except Pro or Gly
  SITE (1206)..(1206): Xaa can be any naturally occurring amino acid except Pro or Gly
  SITE (1208)..(1208): Xaa can be any naturally occurring amino acid
  SITE (1209)..(1209): Xaa can be any naturally occurring amino acid
  SITE (1210)..(1210): Xaa can be any naturally occurring amino acid
  SITE (1212)..(1212): Xaa can be any naturally occurring amino acid except Pro or Gly
  SITE (1213)..(1213): Xaa can be any naturally occurring amino acid except Pro or Gly
  SITE (1214)..(1214): Xaa can be any naturally occurring amino acid except Pro or Gly
  SITE (1216)..(1216): Xaa can be any naturally occurring amino acid
  SITE (1217)..(1217): Xaa can be any naturally occurring amino acid
  SITE (1218)..(1218): Xaa can be any naturally occurring amino acid
  SITE (1220)..(1220): Xaa can be any naturally occurring amino acid except Pro or Gly
  SITE (1221)..(1221): Xaa can be any naturally occurring amino acid except Pro or Gly
  SITE (1222)..(1222): Xaa can be any naturally occurring amino acid except Pro or Gly
  SITE (1224)..(1224): Xaa can be any naturally occurring amino acid
  SITE (1225)..(1225): Xaa can be any naturally occurring amino acid
  SITE (1226)..(1226): Xaa can be any naturally occurring amino acid
  SITE (1228)..(1228): Xaa can be any naturally occurring amino acid except Pro or Gly
  SITE (1229)..(1229): Xaa can be any naturally occurring amino acid except Pro or Gly
  SITE (1230)..(1230): Xaa can be any naturally occurring amino acid except Pro or Gly
  SITE (1232)..(1232): Xaa can be any naturally occurring amino acid
  SITE (1233)..(1233): Xaa can be any naturally occurring amino acid
  SITE (1234)..(1234): Xaa can be any naturally occurring amino acid
  SITE (1236)..(1236): Xaa can be any naturally occurring amino acid except Pro or Gly
  SITE (1237)..(1237): Xaa can be any naturally occurring amino acid except Pro or Gly
  SITE (1238)..(1238): Xaa can be any naturally occurring amino acid except Pro or Gly
  SITE (1240)..(1240): Xaa can be any naturally occurring amino acid
  SITE (1241)..(1241): Xaa can be any naturally occurring amino acid
  SITE (1242)..(1242): Xaa can be any naturally occurring amino acid
  SITE (1244)..(1244): Xaa can be any naturally occurring amino acid except Pro or Gly
  SITE (1245)..(1245): Xaa can be any naturally occurring amino acid except Pro or Gly
  SITE (1246)..(1246): Xaa can be any naturally occurring amino acid except Pro or Gly
  SITE (1248)..(1248): Xaa can be any naturally occurring amino acid
  SITE (1249)..(1249): Xaa can be any naturally occurring amino acid
  SITE (1250)..(1250): Xaa can be any naturally occurring amino acid
  SITE (1252)..(1252): Xaa can be any naturally occurring amino acid except Pro or Gly
  SITE (1253)..(1253): Xaa can be any naturally occurring amino acid except Pro or Gly
  SITE (1254)..(1254): Xaa can be any naturally occurring amino acid except Pro or Gly
  SITE (1256)..(1256): Xaa can be any naturally occurring amino acid
  SITE (1257)..(1257): Xaa can be any naturally occurring amino acid
  SITE (1258)..(1258): Xaa can be any naturally occurring amino acid
  SITE (1260)..(1260): Xaa can be any naturally occurring amino acid except Pro or Gly
  SITE (1261)..(1261): Xaa can be any naturally occurring amino acid except Pro or Gly
  SITE (1262)..(1262): Xaa can be any naturally occurring amino acid except Pro or Gly
  SITE (1264)..(1264): Xaa can be any naturally occurring amino acid
  SITE (1265)..(1265): Xaa can be any naturally occurring amino acid
  SITE (1266)..(1266): Xaa can be any naturally occurring amino acid
  SITE (1268)..(1268): Xaa can be any naturally occurring amino acid except Pro or Gly
  SITE (1269)..(1269): Xaa can be any naturally occurring amino acid except Pro or Gly
  SITE (1270)..(1270): Xaa can be any naturally occurring amino acid except Pro or Gly
  SITE (1272)..(1272): Xaa can be any naturally occurring amino acid
  SITE (1273)..(1273): Xaa can be any naturally occurring amino acid
  SITE (1274)..(1274): Xaa can be any naturally occurring amino acid
  SITE (1276)..(1276): Xaa can be any naturally occurring amino acid except Pro or Gly
  SITE (1277)..(1277): Xaa can be any naturally occurring amino acid except Pro or Gly
  SITE (1278)..(1278): Xaa can be any naturally occurring amino acid except Pro or Gly
  SITE (1280)..(1280): Xaa can be any naturally occurring amino acid
XXPXXXGXXXPXXXGXXXPXXXGXXXPXXXGXXXPXXXGXXXPXXXGXXXPXXXGXXXPXXXGXXXPXXXGXXXPXXXGXXXPXXXGXXXPXXXGXXXPXXXGXXXPXXXGXXXPXXXGXXXPXXXGXXXPXXXGXXXPXXXGXXXPXXXGXXXPXXXGXXXPXXXGXXXPXXXGXXXPXXXGXXXPXXXGXXXPXXXGXXXPXXXGXXXPXXXGXXXPXXXGXXXPXXXGXXXPXXXGXXXPXXXGXXXPXXXGXXXPXXXGXXXPXXXGXXXPXXXGXXXPXXXGXXXPXXXGXXXPXXXGXXXPXXXGXXXPXXXGXXXPXXXGXXXPXXXGXXXPXXXGXXXPXXXGXXXPXXXGXXXPXXXGXXXPXXXGXXXPXXXGXXXPXXXGXXXPXXXGXXXPXXXGXXXPXXXGXXXPXXXGXXXPXXXGXXXPXXXGXXXPXXXGXXXPXXXGXXXPXXXGXXXPXXXGXXXPXXXGXXXPXXXGXXXPXXXGXXXPXXXGXXXPXXXGXXXPXXXGXXXPXXXGXXXPXXXGXXXPXXXGXXXPXXXGXXXPXXXGXXXPXXXGXXXPXXXGXXXPXXXGXXXPXXXGXXXPXXXGXXXPXXXGXXXPXXXGXXXPXXXGXXXPXXXGXXXPXXXGXXXPXXXGXXXPXXXGXXXPXXXGXXXPXXXGXXXPXXXGXXXPXXXGXXXPXXXGXXXPXXXGXXXPXXXGXXXPXXXGXXXPXXXGXXXPXXXGXXXPXXXGXXXPXXXGXXXPXXXGXXXPXXXGXXXPXXXGXXXPXXXGXXXPXXXGXXXPXXXGXXXPXXXGXXXPXXXGXXXPXXXGXXXPXXXGXXXPXXXGXXXPXXXGXXXPXXXGXXXPXXXGXXXPXXXGXXXPXXXGXXXPXXXGXXXPXXXGXXXPXXXGXXXPXXXGXXXPXXXGXXXPXXXGXXXPXXXGXXXPXXXGXXXPXXXGXXXPXXXGXXXPXXXGXXXPXXXGXXXPXXXGXXXPXXXGXXXPXXXGXXXPXXXGXXXPXXXGXXXPXXXGXXXPXXXGXXXPXXXGXXXPXXXGXXXPXXXGXXXPXXXGXXXPXXXGXXXPXXXGXXXPXXXGXXXPXXXGXXXPXXXGXXXPXXXGXXXPXXXGXXXPXXXGXXXPXXXGXXXPXXXGXXXPXXXGXXXPXXXGXXXPXXXGXXXPXXXGXXXPXXXGXXXPXXXGXXXPXXXGXXXPXXXGXXXPXXXGXXXPXXXGXXXPXXXGXXXPXXXGXXXPXXXGXXXPXXXGXXXPXXXGXXXPXXXGXXXPXXXGX

SEQ ID NO: 152 - protein, 1280 aa, Artificial Sequence
  elastin-like polypeptide
  SITE (5)..(5): Xaa is Gln or Ser
  SITE (7)..(7): Xaa is Tyr or Val
  SITE (8)..(8): Xaa is Gln or Ser
  SITE (13)..(13): Xaa is Gln or Ser
  SITE (15)..(15): Xaa is Tyr or Val
  SITE (16)..(16): Xaa is Gln or Ser
  SITE (21)..(21): Xaa is Gln or Ser
  SITE (23)..(23): Xaa is Tyr or Val
  SITE (24)..(24): Xaa is Gln or Ser
  SITE (29)..(29): Xaa is Gln or Ser
  SITE (31)..(31): Xaa is Tyr or Val
  SITE (32)..(32): Xaa is Gln or Ser
  SITE (37)..(37): Xaa is Gln or Ser
  SITE (39)..(39): Xaa is Tyr or Val
  SITE (40)..(40): Xaa is Gln or Ser
  SITE (45)..(45): Xaa is Gln or Ser
  SITE (47)..(47): Xaa is Tyr or Val
  SITE (48)..(48): Xaa is Gln or Ser
  SITE (53)..(53): Xaa is Gln or Ser
  SITE (55)..(55): Xaa is Tyr or Val
  SITE (56)..(56): Xaa is Gln or Ser
  SITE (61)..(61): Xaa is Gln or Ser
  SITE (63)..(63): Xaa is Tyr or Val
  SITE (64)..(64): Xaa is Gln or Ser
  SITE (69)..(69): Xaa is Gln or Ser
  SITE (71)..(71): Xaa is Tyr or Val
  SITE (72)..(72): Xaa is Gln or Ser
  SITE (77)..(77): Xaa is Gln or Ser
  SITE (79)..(79): Xaa is Tyr or Val
  SITE (80)..(80): Xaa is Gln or Ser
  SITE (81)..(1280): May be present or absent in groups of the repeat unit Gly Arg Gly Asp Xaa Pro Xaa Xaa
  SITE (85)..(85): Xaa is Gln or Ser
  SITE (87)..(87): Xaa is Tyr or Val
  SITE (88)..(88): Xaa is Gln or Ser
  SITE (93)..(93): Xaa is Gln or Ser
  SITE (95)..(95): Xaa is Tyr or Val
  SITE (96)..(96): Xaa is Gln or Ser
  SITE (101)..(101): Xaa is Gln or Ser
  SITE (103)..(103): Xaa is Tyr or Val
  SITE (104)..(104): Xaa is Gln or Ser
  SITE (109)..(109): Xaa is Gln or Ser
  SITE (111)..(111): Xaa is Tyr or Val
  SITE (112)..(112): Xaa is Gln or Ser
  SITE (117)..(117): Xaa is Gln or Ser
  SITE (119)..(119): Xaa is Tyr or Val
  SITE (120)..(120): Xaa is Gln or Ser
  SITE (125)..(125): Xaa is Gln or Ser
  SITE (127)..(127): Xaa is Tyr or Val
  SITE (128)..(128): Xaa is Gln or Ser
  SITE (133)..(133): Xaa is Gln or Ser
  SITE (135)..(135): Xaa is Tyr or Val
  SITE (136)..(136): Xaa is Gln or Ser
  SITE (141)..(141): Xaa is Gln or Ser
  SITE (143)..(143): Xaa is Tyr or Val
  SITE (144)..(144): Xaa is Gln or Ser
  SITE (149)..(149): Xaa is Gln or Ser
  SITE (151)..(151): Xaa is Tyr or Val
  SITE (152)..(152): Xaa is Gln or Ser
  SITE (157)..(157): Xaa is Gln or Ser
  SITE (159)..(159): Xaa is Tyr or Val
  SITE (160)..(160): Xaa is Gln or Ser
  SITE (165)..(165): Xaa is Gln or Ser
  SITE (167)..(167): Xaa is Tyr or Val
  SITE (168)..(168): Xaa is Gln or Ser
  SITE (173)..(173): Xaa is Gln or Ser
  SITE (175)..(175): Xaa is Tyr or Val
  SITE (176)..(176): Xaa is Gln or Ser
  SITE (181)..(181): Xaa is Gln or Ser
  SITE (183)..(183): Xaa is Tyr or Val
  SITE (184)..(184): Xaa is Gln or Ser
  SITE (189)..(189): Xaa is Gln or Ser
  SITE (191)..(191): Xaa is Tyr or Val
  SITE (192)..(192): Xaa is Gln or Ser
  SITE (197)..(197): Xaa is Gln or Ser
  SITE (199)..(199): Xaa is Tyr or Val
  SITE (200)..(200): Xaa is Gln or Ser
  SITE (205)..(205): Xaa is Gln or Ser
  SITE (207)..(207): Xaa is Tyr or Val
  SITE (208)..(208): Xaa is Gln or Ser
  SITE (213)..(213): Xaa is Gln or Ser
  SITE (215)..(215): Xaa is Tyr or Val
  SITE (216)..(216): Xaa is Gln or Ser
  SITE (221)..(221): Xaa is Gln or Ser
  SITE (223)..(223): Xaa is Tyr or Val
  SITE (224)..(224): Xaa is Gln or Ser
  SITE (229)..(229): Xaa is Gln or Ser
  SITE (231)..(231): Xaa is Tyr or Val
  SITE (232)..(232): Xaa is Gln or Ser
  SITE (237)..(237): Xaa is Gln or Ser
  SITE (239)..(239): Xaa is Tyr or Val
  SITE (240)..(240): Xaa is Gln or Ser
  SITE (245)..(245): Xaa is Gln or Ser
  SITE (247)..(247): Xaa is Tyr or Val
  SITE (248)..(248): Xaa is Gln or Ser
  SITE (253)..(253): Xaa is Gln or Ser
  SITE (255)..(255): Xaa is Tyr or Val
  SITE (256)..(256): Xaa is Gln or Ser
  SITE (261)..(261): Xaa is Gln or Ser
  SITE (263)..(263): Xaa is Tyr or Val
  SITE (264)..(264): Xaa is Gln or Ser
  SITE (269)..(269): Xaa is Gln or Ser
  SITE (271)..(271): Xaa is Tyr or Val
  SITE (272)..(272): Xaa is Gln or Ser
  SITE (277)..(277): Xaa is Gln or Ser
  SITE (279)..(279): Xaa is Tyr or Val
  SITE (280)..(280): Xaa is Gln or Ser
  SITE (285)..(285): Xaa is Gln or Ser
  SITE (287)..(287): Xaa is Tyr or Val
  SITE (288)..(288): Xaa is Gln or Ser
  SITE (293)..(293): Xaa is Gln or Ser
  SITE (295)..(295): Xaa is Tyr or Val
  SITE (296)..(296): Xaa is Gln or Ser
  SITE (301)..(301): Xaa is Gln or Ser
  SITE (303)..(303): Xaa is Tyr or Val
  SITE (304)..(304): Xaa is Gln or Ser
  SITE (309)..(309): Xaa is Gln or Ser
  SITE (311)..(311): Xaa is Tyr or Val
  SITE (312)..(312): Xaa is Gln or Ser
  SITE (317)..(317): Xaa is Gln or Ser
  SITE (319)..(319): Xaa is Tyr or Val
  SITE (320)..(320): Xaa is Gln or Ser
  SITE (325)..(325): Xaa is Gln or Ser
  SITE (327)..(327): Xaa is Tyr or Val
  SITE (328)..(328): Xaa is Gln or Ser
  SITE (333)..(333): Xaa is Gln or Ser
  SITE (335)..(335): Xaa is Tyr or Val
  SITE (336)..(336): Xaa is Gln or Ser
  SITE (341)..(341): Xaa is Gln or Ser
  SITE (343)..(343): Xaa is Tyr or Val
  SITE (344)..(344): Xaa is Gln or Ser
  SITE (349)..(349): Xaa is Gln or Ser
  SITE (351)..(351): Xaa is Tyr or Val
  SITE (352)..(352): Xaa is Gln or Ser
  SITE (357)..(357): Xaa is Gln or Ser
  SITE (359)..(359): Xaa is Tyr or Val
  SITE (360)..(360): Xaa is Gln or Ser
  SITE (365)..(365): Xaa is Gln or Ser
  SITE (367)..(367): Xaa is Tyr or Val
  SITE (368)..(368): Xaa is Gln or Ser
  SITE (373)..(373): Xaa is Gln or Ser
  SITE (375)..(375): Xaa is Tyr or Val
  SITE (376)..(376): Xaa is Gln or Ser
  SITE (381)..(381): Xaa is Gln or Ser
  SITE (383)..(383): Xaa is Tyr or Val
  SITE (384)..(384): Xaa is Gln or Ser
  SITE (389)..(389): Xaa is Gln or Ser
  SITE (391)..(391): Xaa is Tyr or Val
  SITE (392)..(392): Xaa is Gln or Ser
  SITE (397)..(397): Xaa is Gln or Ser
  SITE (399)..(399): Xaa is Tyr or Val
  SITE (400)..(400): Xaa is Gln or Ser
  SITE (405)..(405): Xaa is Gln or Ser
  SITE (407)..(407): Xaa is Tyr or Val
  SITE (408)..(408): Xaa is Gln or Ser
  SITE (413)..(413): Xaa is Gln or Ser
  SITE (415)..(415): Xaa is Tyr or Val
  SITE (416)..(416): Xaa is Gln or Ser
  SITE (421)..(421): Xaa is Gln or Ser
  SITE (423)..(423): Xaa is Tyr or Val
  SITE (424)..(424): Xaa is Gln or Ser
  SITE (429)..(429): Xaa is Gln or Ser
  SITE (431)..(431): Xaa is Tyr or Val
  SITE (432)..(432): Xaa is Gln or Ser
  SITE (437)..(437): Xaa is Gln or Ser
  SITE (439)..(439): Xaa is Tyr or Val
  SITE (440)..(440): Xaa is Gln or Ser
  SITE (445)..(445): Xaa is Gln or Ser
  SITE (447)..(447): Xaa is Tyr or Val
  SITE (448)..(448): Xaa is Gln or Ser
  SITE (453)..(453): Xaa is Gln or Ser
  SITE (455)..(455): Xaa is Tyr or Val
  SITE (456)..(456): Xaa is Gln or Ser
  SITE (461)..(461): Xaa is Gln or Ser
  SITE (463)..(463): Xaa is Tyr or Val
  SITE (464)..(464): Xaa is Gln or Ser
  SITE (469)..(469): Xaa is Gln or Ser
  SITE (471)..(471): Xaa is Tyr or Val
  SITE (472)..(472): Xaa is Gln or Ser
  SITE (477)..(477): Xaa is Gln or Ser
  SITE (479)..(479): Xaa is Tyr or Val
  SITE (480)..(480): Xaa is Gln or Ser
  SITE (485)..(485): Xaa is Gln or Ser
  SITE (487)..(487): Xaa is Tyr or Val
  SITE (488)..(488): Xaa is Gln or Ser
  SITE (493)..(493): Xaa is Gln or Ser
  SITE (495)..(495): Xaa is Tyr or Val
  SITE (496)..(496): Xaa is Gln or Ser
  SITE (501)..(501): Xaa is Gln or Ser
  SITE (503)..(503): Xaa is Tyr or Val
  SITE (504)..(504): Xaa is Gln or Ser
  SITE (509)..(509): Xaa is Gln or Ser
  SITE (511)..(511): Xaa is Tyr or Val
  SITE (512)..(512): Xaa is Gln or Ser
  SITE (517)..(517): Xaa is Gln or Ser
  SITE (519)..(519): Xaa is Tyr or Val
  SITE (520)..(520): Xaa is Gln or Ser
  SITE (525)..(525): Xaa is Gln or Ser
  SITE (527)..(527): Xaa is Tyr or Val
  SITE (528)..(528): Xaa is Gln or Ser
  SITE (533)..(533): Xaa is Gln or Ser
  SITE (535)..(535): Xaa is Tyr or Val
  SITE (536)..(536): Xaa is Gln or Ser
  SITE (541)..(541): Xaa is Gln or Ser
  SITE (543)..(543): Xaa is Tyr or Val
  SITE (544)..(544): Xaa is Gln or Ser
  SITE (549)..(549): Xaa is Gln or Ser
  SITE (551)..(551): Xaa is Tyr or Val
  SITE (552)..(552): Xaa is Gln or Ser
  SITE (557)..(557): Xaa is Gln or Ser
  SITE (559)..(559): Xaa is Tyr or Val
  SITE (560)..(560): Xaa is Gln or Ser
  SITE (565)..(565): Xaa is Gln or Ser
  SITE (567)..(567): Xaa is Tyr or Val
  SITE (568)..(568): Xaa is Gln or Ser
  SITE (573)..(573): Xaa is Gln or Ser
  SITE (575)..(575): Xaa is Tyr or Val
  SITE (576)..(576): Xaa is Gln or Ser
  SITE (581)..(581): Xaa is Gln or Ser
  SITE (583)..(583): Xaa is Tyr or Val
  SITE (584)..(584): Xaa is Gln or Ser
  SITE (589)..(589): Xaa is Gln or Ser
  SITE (591)..(591): Xaa is Tyr or Val
  SITE (592)..(592): Xaa is Gln or Ser
  SITE (597)..(597): Xaa is Gln or Ser
  SITE (599)..(599): Xaa is Tyr or Val
  SITE (600)..(600): Xaa is Gln or Ser
  SITE (605)..(605): Xaa is Gln or Ser
  SITE (607)..(607): Xaa is Tyr or Val
  SITE (608)..(608): Xaa is Gln or Ser
  SITE (613)..(613): Xaa is Gln or Ser
  SITE (615)..(615): Xaa is Tyr or Val
  SITE (616)..(616): Xaa is Gln or Ser
  SITE (621)..(621): Xaa is Gln or Ser
  SITE (623)..(623): Xaa is Tyr or Val
  SITE (624)..(624): Xaa is Gln or Ser
  SITE (629)..(629): Xaa is Gln or Ser
  SITE (631)..(631): Xaa is Tyr or Val
  SITE (632)..(632): Xaa is Gln or Ser
  SITE (637)..(637): Xaa is Gln or Ser
  SITE (639)..(639): Xaa is Tyr or Val
  SITE (640)..(640): Xaa is Gln or Ser
  SITE (645)..(645): Xaa is Gln or Ser
  SITE (647)..(647): Xaa is Tyr or Val
  SITE (648)..(648): Xaa is Gln or Ser
  SITE (653)..(653): Xaa is Gln or Ser
  SITE (655)..(655): Xaa is Tyr or Val
  SITE (656)..(656): Xaa is Gln or Ser
  SITE (661)..(661): Xaa is Gln or Ser
  SITE (663)..(663): Xaa is Tyr or Val
  SITE (664)..(664): Xaa is Gln or Ser
  SITE (669)..(669): Xaa is Gln or Ser
  SITE (671)..(671): Xaa is Tyr or Val
  SITE (672)..(672): Xaa is Gln or Ser
  SITE (677)..(677): Xaa is Gln or Ser
  SITE (679)..(679): Xaa is Tyr or Val
  SITE (680)..(680): Xaa is Gln or Ser
  SITE (685)..(685): Xaa is Gln or Ser
  SITE (687)..(687): Xaa is Tyr or Val
  SITE (688)..(688): Xaa is Gln or Ser
  SITE (693)..(693): Xaa is Gln or Ser
  SITE (695)..(695): Xaa is Tyr or Val
  SITE (696)..(696): Xaa is Gln or Ser
  SITE (701)..(701): Xaa is Gln or Ser
  SITE (703)..(703): Xaa is Tyr or Val
  SITE (704)..(704): Xaa is Gln or Ser
  SITE (709)..(709): Xaa is Gln or Ser
  SITE (711)..(711): Xaa is Tyr or Val
  SITE (712)..(712): Xaa is Gln or Ser
  SITE (717)..(717): Xaa is Gln or Ser
  SITE (719)..(719): Xaa is Tyr or Val
  SITE (720)..(720): Xaa is Gln or Ser
  SITE (725)..(725): Xaa is Gln or Ser
  SITE (727)..(727): Xaa is Tyr or Val
  SITE (728)..(728): Xaa is Gln or Ser
  SITE (733)..(733): Xaa is Gln or Ser
  SITE (735)..(735): Xaa is Tyr or Val
  SITE (736)..(736): Xaa is Gln or Ser
  SITE (741)..(741): Xaa is Gln or Ser
  SITE (743)..(743): Xaa is Tyr or Val
  SITE (744)..(744): Xaa is Gln or Ser
  SITE (749)..(749): Xaa is Gln or Ser
  SITE (751)..(751): Xaa is Tyr or Val
  SITE (752)..(752): Xaa is Gln or Ser
  SITE (757)..(757): Xaa is Gln or Ser
  SITE (759)..(759): Xaa is Tyr or Val
  SITE (760)..(760): Xaa is Gln or Ser
  SITE (765)..(765): Xaa is Gln or Ser
  SITE (767)..(767): Xaa is Tyr or Val
  SITE (768)..(768): Xaa is Gln or Ser
  SITE (773)..(773): Xaa is Gln or Ser
  SITE (775)..(775): Xaa is Tyr or Val
  SITE (776)..(776): Xaa is Gln or Ser
  SITE (781)..(781): Xaa is Gln or Ser
  SITE (783)..(783): Xaa is Tyr or Val
  SITE (784)..(784): Xaa is Gln or Ser
  SITE (789)..(789): Xaa is Gln or Ser
  SITE (791)..(791): Xaa is Tyr or Val
  SITE (792)..(792): Xaa is Gln or Ser
  SITE (797)..(797): Xaa is Gln or Ser
  SITE (799)..(799): Xaa is Tyr or Val
  SITE (800)..(800): Xaa is Gln or Ser
  SITE (805)..(805): Xaa is Gln or Ser
  SITE (807)..(807): Xaa is Tyr or Val
  SITE (808)..(808): Xaa is Gln or Ser
  SITE (813)..(813): Xaa is Gln or Ser
  SITE (815)..(815): Xaa is Tyr or Val
  SITE (816)..(816): Xaa is Gln or Ser
  SITE (821)..(821): Xaa is Gln or Ser
  SITE (823)..(823): Xaa is Tyr or Val
  SITE (824)..(824): Xaa is Gln or Ser
  SITE (829)..(829): Xaa is Gln or Ser
  SITE (831)..(831): Xaa is Tyr or Val
  SITE (832)..(832): Xaa is Gln or Ser
  SITE (837)..(837): Xaa is Gln or Ser
  SITE (839)..(839): Xaa is Tyr or Val
  SITE (840)..(840): Xaa is Gln or Ser
  SITE (845)..(845): Xaa is Gln or Ser
  SITE (847)..(847): Xaa is Tyr or Val
  SITE (848)..(848): Xaa is Gln or Ser
  SITE (853)..(853): Xaa is Gln or Ser
  SITE (855)..(855): Xaa is Tyr or Val
  SITE (856)..(856): Xaa is Gln or Ser
  SITE (861)..(861): Xaa is Gln or Ser
  SITE (863)..(863): Xaa is Tyr or Val
  SITE (864)..(864): Xaa is Gln or Ser
  SITE (869)..(869): Xaa is Gln or Ser
  SITE (871)..(871): Xaa is Tyr or Val
  SITE (872)..(872): Xaa is Gln or Ser
  SITE (877)..(877): Xaa is Gln or Ser
  SITE (879)..(879): Xaa is Tyr or Val
  SITE (880)..(880): Xaa is Gln or Ser
  SITE (885)..(885): Xaa is Gln or Ser
  SITE (887)..(887): Xaa is Tyr or Val
  SITE (888)..(888): Xaa is Gln or Ser
  SITE (893)..(893): Xaa is Gln or Ser
  SITE (895)..(895): Xaa is Tyr or Val
  SITE (896)..(896): Xaa is Gln or Ser
  SITE (901)..(901): Xaa is Gln or Ser
  SITE (903)..(903): Xaa is Tyr or Val
  SITE (904)..(904): Xaa is Gln or Ser
  SITE (909)..(909): Xaa is Gln or Ser
  SITE (911)..(911): Xaa is Tyr or Val
  SITE (912)..(912): Xaa is Gln or Ser
  SITE (917)..(917): Xaa is Gln or Ser
  SITE (919)..(919): Xaa is Tyr or Val
  SITE (920)..(920): Xaa is Gln or Ser
  SITE (925)..(925): Xaa is Gln or Ser
  SITE (927)..(927): Xaa is Tyr or Val
  SITE (928)..(928): Xaa is Gln or Ser
  SITE (933)..(933): Xaa is Gln or Ser
  SITE (935)..(935): Xaa is Tyr or Val
  SITE (936)..(936): Xaa is Gln or Ser
  SITE (941)..(941): Xaa is Gln or Ser
  SITE (943)..(943): Xaa is Tyr or Val
  SITE (944)..(944): Xaa is Gln or Ser
  SITE (949)..(949): Xaa is Gln or Ser
  SITE (951)..(951): Xaa is Tyr or Val
  SITE (952)..(952): Xaa is Gln or Ser
  SITE (957)..(957): Xaa is Gln or Ser
  SITE (959)..(959): Xaa is Tyr or Val
  SITE (960)..(960): Xaa is Gln or Ser
  SITE (965)..(965): Xaa is Gln or Ser
  SITE (967)..(967): Xaa is Tyr or Val
  SITE (968)..(968): Xaa is Gln or Ser
  SITE (973)..(973): Xaa is Gln or Ser
  SITE (975)..(975): Xaa is Tyr or Val
  SITE (976)..(976): Xaa is Gln or Ser
  SITE (981)..(981): Xaa is Gln or Ser
  SITE (983)..(983): Xaa is Tyr or Val
  SITE (984)..(984): Xaa is Gln or Ser
  SITE (989)..(989): Xaa is Gln or Ser
  SITE (991)..(991): Xaa is Tyr or Val
  SITE (992)..(992): Xaa is Gln or Ser
  SITE (997)..(997): Xaa is Gln or Ser
  SITE (999)..(999): Xaa is Tyr or Val
  SITE (1000)..(1000): Xaa is Gln or Ser
  SITE (1005)..(1005): Xaa is Gln or Ser
  SITE (1007)..(1007): Xaa is Tyr or Val
  SITE (1008)..(1008): Xaa is Gln or Ser
  SITE (1013)..(1013): Xaa is Gln or Ser
  SITE (1015)..(1015): Xaa is Tyr or Val
  SITE (1016)..(1016): Xaa is Gln or Ser
  SITE (1021)..(1021): Xaa is Gln or Ser
  SITE (1023)..(1023): Xaa is Tyr or Val
  SITE (1024)..(1024): Xaa is Gln or Ser
  SITE (1029)..(1029): Xaa is Gln or Ser
  SITE (1031)..(1031): Xaa is Tyr or Val
  SITE (1032)..(1032): Xaa is Gln or Ser
  SITE (1037)..(1037): Xaa is Gln or Ser
  SITE (1039)..(1039): Xaa is Tyr or Val
  SITE (1040)..(1040): Xaa is Gln or Ser
  SITE (1045)..(1045): Xaa is Gln or Ser
  SITE (1047)..(1047): Xaa is Tyr or Val
  SITE (1048)..(1048): Xaa is Gln or Ser
  SITE (1053)..(1053): Xaa is Gln or Ser
  SITE (1055)..(1055): Xaa is Tyr or Val
  SITE (1056)..(1056): Xaa is Gln or Ser
  SITE (1061)..(1061): Xaa is Gln or Ser
  SITE (1063)..(1063): Xaa is Tyr or Val
  SITE (1064)..(1064): Xaa is Gln or Ser
  SITE (1069)..(1069): Xaa is Gln or Ser
  SITE (1071)..(1071): Xaa is Tyr or Val
  SITE (1072)..(1072): Xaa is Gln or Ser
  SITE (1077)..(1077): Xaa is Gln or Ser
  SITE (1079)..(1079): Xaa is Tyr or Val
  SITE (1080)..(1080): Xaa is Gln or Ser
  SITE (1085)..(1085): Xaa is Gln or Ser
  SITE (1087)..(1087): Xaa is Tyr or Val
  SITE (1088)..(1088): Xaa is Gln or Ser
  SITE (1093)..(1093): Xaa is Gln or Ser
  SITE (1095)..(1095): Xaa is Tyr or Val
  SITE (1096)..(1096): Xaa is Gln or Ser
  SITE (1101)..(1101): Xaa is Gln or Ser
  SITE (1103)..(1103): Xaa is Tyr or Val
  SITE (1104)..(1104): Xaa is Gln or Ser
  SITE (1109)..(1109): Xaa is Gln or Ser
  SITE (1111)..(1111): Xaa is Tyr or Val
  SITE (1112)..(1112): Xaa is Gln or Ser
  SITE (1117)..(1117): Xaa is Gln or Ser
  SITE (1119)..(1119): Xaa is Tyr or Val
  SITE (1120)..(1120): Xaa is Gln or Ser
  SITE (1125)..(1125): Xaa is Gln or Ser
  SITE (1127)..(1127): Xaa is Tyr or Val
  SITE (1128)..(1128): Xaa is Gln or Ser
  SITE (1133)..(1133): Xaa is Gln or Ser
  SITE (1135)..(1135): Xaa is Tyr or Val
  SITE (1136)..(1136): Xaa is Gln or Ser
  SITE (1141)..(1141): Xaa is Gln or Ser
  SITE (1143)..(1143): Xaa is Tyr or Val
  SITE (1144)..(1144): Xaa is Gln or Ser
  SITE (1149)..(1149): Xaa is Gln or Ser
  SITE (1151)..(1151): Xaa is Tyr or Val
  SITE (1152)..(1152): Xaa is Gln or Ser
  SITE (1157)..(1157): Xaa is Gln or Ser
  SITE (1159)..(1159): Xaa is Tyr or Val
  SITE (1160)..(1160): Xaa is Gln or Ser
  SITE (1165)..(1165): Xaa is Gln or Ser
  SITE (1167)..(1167): Xaa is Tyr or Val
  SITE (1168)..(1168): Xaa is Gln or Ser
  SITE (1173)..(1173): Xaa is Gln or Ser
  SITE (1175)..(1175): Xaa is Tyr or Val
  SITE (1176)..(1176): Xaa is Gln or Ser
  SITE (1181)..(1181): Xaa is Gln or Ser
  SITE (1183)..(1183): Xaa is Tyr or Val
  SITE (1184)..(1184): Xaa is Gln or Ser
  SITE (1189)..(1189): Xaa is Gln or Ser
  SITE (1191)..(1191): Xaa is Tyr or Val
  SITE (1192)..(1192): Xaa is Gln or Ser
  SITE (1197)..(1197): Xaa is Gln or Ser
  SITE (1199)..(1199): Xaa is Tyr or Val
  SITE (1200)..(1200): Xaa is Gln or Ser
  SITE (1205)..(1205): Xaa is Gln or Ser
  SITE (1207)..(1207): Xaa is Tyr or Val
  SITE (1208)..(1208): Xaa is Gln or Ser
  SITE (1213)..(1213): Xaa is Gln or Ser
  SITE (1215)..(1215): Xaa is Tyr or Val
  SITE (1216)..(1216): Xaa is Gln or Ser
  SITE (1221)..(1221): Xaa is Gln or Ser
  SITE (1223)..(1223): Xaa is Tyr or Val
  SITE (1224)..(1224): Xaa is Gln or Ser
  SITE (1229)..(1229): Xaa is Gln or Ser
  SITE (1231)..(1231): Xaa is Tyr or Val
  SITE (1232)..(1232): Xaa is Gln or Ser
  SITE (1237)..(1237): Xaa is Gln or Ser
  SITE (1239)..(1239): Xaa is Tyr or Val
  SITE (1240)..(1240): Xaa is Gln or Ser
  SITE (1245)..(1245): Xaa is Gln or Ser
  SITE (1247)..(1247): Xaa is Tyr or Val
  SITE (1248)..(1248): Xaa is Gln or Ser
  SITE (1253)..(1253): Xaa is Gln or Ser
  SITE (1255)..(1255): Xaa is Tyr or Val
  SITE (1256)..(1256): Xaa is Gln or Ser
  SITE (1261)..(1261): Xaa is Gln or Ser
  SITE (1263)..(1263): Xaa is Tyr or Val
  SITE (1264)..(1264): Xaa is Gln or Ser
  SITE (1269)..(1269): Xaa is Gln or Ser
  SITE (1271)..(1271): Xaa is Tyr or Val
  SITE (1272)..(1272): Xaa is Gln or Ser
  SITE (1277)..(1277): Xaa is Gln or Ser
  SITE (1279)..(1279): Xaa is Tyr or Val
  SITE (1280)..(1280): Xaa is Gln or Ser
GRGDXPXXGRGDXPXXGRGDXPXXGRGDXPXXGRGDXPXXGRGDXPXXGRGDXPXXGRGDXPXXGRGDXPXXGRGDXPXXGRGDXPXXGRGDXPXXGRGDXPXXGRGDXPXXGRGDXPXXGRGDXPXXGRGDXPXXGRGDXPXXGRGDXPXXGRGDXPXXGRGDXPXXGRGDXPXXGRGDXPXXGRGDXPXXGRGDXPXXGRGDXPXXGRGDXPXXGRGDXPXXGRGDXPXXGRGDXPXXGRGDXPXXGRGDXPXXGRGDXPXXGRGDXPXXGRGDXPXXGRGDXPXXGRGDXPXXGRGDXPXXGRGDXPXXGRGDXPXXGRGDXPXXGRGDXPXXGRGDXPXXGRGDXPXXGRGDXPXXGRGDXPXXGRGDXPXXGRGDXPXXGRGDXPXXGRGDXPXXGRGDXPXXGRGDXPXXGRGDXPXXGRGDXPXXGRGDXPXXGRGDXPXXGRGDXPXXGRGDXPXXGRGDXPXXGRGDXPXXGRGDXPXXGRGDXPXXGRGDXPXXGRGDXPXXGRGDXPXXGRGDXPXXGRGDXPXXGRGDXPXXGRGDXPXXGRGDXPXXGRGDXPXXGRGDXPXXGRGDXPXXGRGDXPXXGRGDXPXXGRGDXPXXGRGDXPXXGRGDXPXXGRGDXPXXGRGDXPXXGRGDXPXXGRGDXPXXGRGDXPXXGRGDXPXXGRGDXPXXGRGDXPXXGRGDXPXXGRGDXPXXGRGDXPXXGRGDXPXXGRGDXPXXGRGDXPXXGRGDXPXXGRGDXPXXGRGDXPXXGRGDXPXXGRGDXPXXGRGDXPXXGRGDXPXXGRGDXPXXGRGDXPXXGRGDXPXXGRGDXPXXGRGDXPXXGRGDXPXXGRGDXPXXGRGDXPXXGRGDXPXXGRGDXPXXGRGDXPXXGRGDXPXXGRGDXPXXGRGDXPXXGRGDXPXXGRGDXPXXGRGDXPXXGRGDXPXXGRGDXPXXGRGDXPXXGRGDXPXXGRGDXPXXGRGDXPXXGRGDXPXXGRGDXPXXGRGDXPXXGRGDXPXXGRGDXPXXGRGDXPXXGRGDXPXXGRGDXPXXGRGDXPXXGRGDXPXXGRGDXPXXGRGDXPXXGRGDXPXXGRGDXPXXGRGDXPXXGRGDXPXXGRGDXPXXGRGDXPXXGRGDXPXXGRGDXPXXGRGDXPXXGRGDXPXXGRGDXPXXGRGDXPXXGRGDXPXXGRGDXPXXGRGDXPXXGRGDXPXXGRGDXPXXGRGDXPXXGRGDXPXXGRGDXPXXGRGDXPXXGRGDXPXXGRGDXPXXGRGDXPXXGRGDXPXXGRGDXPXX

SEQ ID NO: 153 - protein, 1280 aa, Artificial Sequence
  elastin-like polypeptide
  SITE (1)..(1): Xaa is Gln or Ser
  SITE (2)..(2): Xaa is Tyr or Val
  SITE (4)..(4): Xaa is Gln or Ser
  SITE (9)..(9): Xaa is Gln or Ser
  SITE (10)..(10): Xaa is Tyr or Val
  SITE (12)..(12): Xaa is Gln or Ser
  SITE (17)..(17): Xaa is Gln or Ser
  SITE (18)..(18): Xaa is Tyr or Val
  SITE (20)..(20): Xaa is Gln or Ser
  SITE (25)..(25): Xaa is Gln or Ser
  SITE (26)..(26): Xaa is Tyr or Val
  SITE (28)..(28): Xaa is Gln or Ser
  SITE (33)..(33): Xaa is Gln or Ser
  SITE (34)..(34): Xaa is Tyr or Val
  SITE (36)..(36): Xaa is Gln or Ser
  SITE (41)..(41): Xaa is Gln or Ser
  SITE (42)..(42): Xaa is Tyr or Val
  SITE (44)..(44): Xaa is Gln or Ser
  SITE (49)..(49): Xaa is Gln or Ser
  SITE (50)..(50): Xaa is Tyr or Val
  SITE (52)..(52): Xaa is Gln or Ser
  SITE (57)..(57): Xaa is Gln or Ser
  SITE (58)..(58): Xaa is Tyr or Val
  SITE (60)..(60): Xaa is Gln or Ser
  SITE (65)..(65): Xaa is Gln or Ser
  SITE (66)..(66): Xaa is Tyr or Val
  SITE (68)..(68): Xaa is Gln or Ser
  SITE (73)..(73): Xaa is Gln or Ser
  SITE (74)..(74): Xaa is Tyr or Val
  SITE (76)..(76): Xaa is Gln or Ser
  SITE (81)..(1280): May be present or absent in groups of the repeat unit Xaa Xaa Pro Xaa Asp Gly Arg Gly
  SITE (81)..(81): Xaa is Gln or Ser
  SITE (82)..(82): Xaa is Tyr or Val
  SITE (84)..(84): Xaa is Gln or Ser
  SITE (89)..(89): Xaa is Gln or Ser
  SITE (90)..(90): Xaa is Tyr or Val
  SITE (92)..(92): Xaa is Gln or Ser
  SITE (97)..(97): Xaa is Gln or Ser
  SITE (98)..(98): Xaa is Tyr or Val
  SITE (100)..(100): Xaa is Gln or Ser
  SITE (105)..(105): Xaa is Gln or Ser
  SITE (106)..(106): Xaa is Tyr or Val
  SITE (108)..(108): Xaa is Gln or Ser
  SITE (113)..(113): Xaa is Gln or Ser
  SITE (114)..(114): Xaa is Tyr or Val
  SITE (116)..(116): Xaa is Gln or Ser
  SITE (121)..(121): Xaa is Gln or Ser
  SITE (122)..(122): Xaa is Tyr or Val
  SITE (124)..(124): Xaa is Gln or Ser
  SITE (129)..(129): Xaa is Gln or Ser
  SITE (130)..(130): Xaa is Tyr or Val
  SITE (132)..(132): Xaa is Gln or Ser
  SITE (137)..(137): Xaa is Gln or Ser
  SITE (138)..(138): Xaa is Tyr or Val
  SITE (140)..(140): Xaa is Gln or Ser
  SITE (145)..(145): Xaa is Gln or Ser
  SITE (146)..(146): Xaa is Tyr or Val
  SITE (148)..(148): Xaa is Gln or Ser
  SITE (153)..(153): Xaa is Gln or Ser
  SITE (154)..(154): Xaa is Tyr or Val
  SITE (156)..(156): Xaa is Gln or Ser
  SITE (161)..(161): Xaa is Gln or Ser
  SITE (162)..(162): Xaa is Tyr or Val
  SITE (164)..(164): Xaa is Gln or Ser
  SITE (169)..(169): Xaa is Gln or Ser
  SITE (170)..(170): Xaa is Tyr or Val
  SITE (172)..(172): Xaa is Gln or Ser
  SITE (177)..(177): Xaa is Gln or Ser
  SITE (178)..(178): Xaa is Tyr or Val
  SITE (180)..(180): Xaa is Gln or Ser
  SITE (185)..(185): Xaa is Gln or Ser
  SITE (186)..(186): Xaa is Tyr or Val
  SITE (188)..(188): Xaa is Gln or Ser
  SITE (193)..(193): Xaa is Gln or Ser
  SITE (194)..(194): Xaa is Tyr or Val
  SITE (196)..(196): Xaa is Gln or Ser
  SITE (201)..(201): Xaa is Gln or Ser
  SITE (202)..(202): Xaa is Tyr or Val
  SITE (204)..(204): Xaa is Gln or Ser
  SITE (209)..(209): Xaa is Gln or Ser
  SITE (210)..(210): Xaa is Tyr or Val
  SITE (212)..(212): Xaa is Gln or Ser
  SITE (217)..(217): Xaa is Gln or Ser
  SITE (218)..(218): Xaa is Tyr or Val
  SITE (220)..(220): Xaa is Gln or Ser
  SITE (225)..(225): Xaa is Gln or Ser
  SITE (226)..(226): Xaa is Tyr or Val
  SITE (228)..(228): Xaa is Gln or Ser
  SITE (233)..(233): Xaa is Gln or Ser
  SITE (234)..(234): Xaa is Tyr or Val
  SITE (236)..(236): Xaa is Gln or Ser
  SITE (241)..(241): Xaa is Gln or Ser
  SITE (242)..(242): Xaa is Tyr or Val
  SITE (244)..(244): Xaa is Gln or Ser
  SITE (249)..(249): Xaa is Gln or Ser
  SITE (250)..(250): Xaa is Tyr or Val
  SITE (252)..(252): Xaa is Gln or Ser
  SITE (257)..(257): Xaa is Gln or Ser
  SITE (258)..(258): Xaa is Tyr or Val
  SITE (260)..(260): Xaa is Gln or Ser
  SITE (265)..(265): Xaa is Gln or Ser
  SITE (266)..(266): Xaa is Tyr or Val
  SITE (268)..(268): Xaa is Gln or Ser
  SITE (273)..(273): Xaa is Gln or Ser
  SITE (274)..(274): Xaa is Tyr or Val
  SITE (276)..(276): Xaa is Gln or Ser
  SITE (281)..(281): Xaa is Gln or Ser
  SITE (282)..(282): Xaa is Tyr or Val
  SITE (284)..(284): Xaa is Gln or Ser
  SITE (289)..(289): Xaa is Gln or Ser
  SITE (290)..(290): Xaa is Tyr or Val
  SITE (292)..(292): Xaa is Gln or Ser
  SITE (297)..(297): Xaa is Gln or Ser
  SITE (298)..(298): Xaa is Tyr or Val
  SITE (300)..(300): Xaa is Gln or Ser
  SITE (305)..(305): Xaa is Gln or Ser
  SITE (306)..(306): Xaa is Tyr or Val
  SITE (308)..(308): Xaa is Gln or Ser
  SITE (313)..(313): Xaa is Gln or Ser
  SITE (314)..(314): Xaa is Tyr or Val
  SITE (316)..(316): Xaa is Gln or Ser
  SITE (321)..(321): Xaa is Gln or Ser
  SITE (322)..(322): Xaa is Tyr or Val
  SITE (324)..(324): Xaa is Gln or Ser
  SITE (329)..(329): Xaa is Gln or Ser
  SITE (330)..(330): Xaa is Tyr or Val
  SITE (332)..(332): Xaa is Gln or Ser
  SITE (337)..(337): Xaa is Gln or Ser
  SITE (338)..(338): Xaa is Tyr or Val
  SITE (340)..(340): Xaa is Gln or Ser
  SITE (345)..(345): Xaa is Gln or Ser
  SITE (346)..(346): Xaa is Tyr or Val
  SITE (348)..(348): Xaa is Gln or Ser
  SITE (353)..(353): Xaa is Gln or Ser
  SITE (354)..(354): Xaa is Tyr or Val
  SITE (356)..(356): Xaa is Gln or Ser
  SITE (361)..(361): Xaa is Gln or Ser
  SITE (362)..(362): Xaa is Tyr or Val
  SITE (364)..(364): Xaa is Gln or Ser
  SITE (369)..(369): Xaa is Gln or Ser
  SITE (370)..(370): Xaa is Tyr or Val
  SITE (372)..(372): Xaa is Gln or Ser
  SITE (377)..(377): Xaa is Gln or Ser
  SITE (378)..(378): Xaa is Tyr or Val
  SITE (380)..(380): Xaa is Gln or Ser
  SITE (385)..(385): Xaa is Gln or Ser
  SITE (386)..(386): Xaa is Tyr or Val
  SITE (388)..(388): Xaa is Gln or Ser
  SITE (393)..(393): Xaa is Gln or Ser
  SITE (394)..(394): Xaa is Tyr or Val
  SITE (396)..(396): Xaa is Gln or Ser
  SITE (401)..(401): Xaa is Gln or Ser
  SITE (402)..(402): Xaa is Tyr or Val
  SITE (404)..(404): Xaa is Gln or Ser
  SITE (409)..(409): Xaa is Gln or Ser
  SITE (410)..(410): Xaa is Tyr or Val
  SITE (412)..(412): Xaa is Gln or Ser
  SITE (417)..(417): Xaa is Gln or Ser
  SITE (418)..(418): Xaa is Tyr or Val
  SITE (420)..(420): Xaa is Gln or Ser
  SITE (425)..(425): Xaa is Gln or Ser
  SITE (426)..(426): Xaa is Tyr or Val
  SITE (428)..(428): Xaa is Gln or Ser
  SITE (433)..(433): Xaa is Gln or Ser
  SITE (434)..(434): Xaa is Tyr or Val
  SITE (436)..(436): Xaa is Gln or Ser
  SITE (441)..(441): Xaa is Gln or Ser
  SITE (442)..(442): Xaa is Tyr or Val
  SITE (444)..(444): Xaa is Gln or Ser
  SITE (449)..(449): Xaa is Gln or Ser
  SITE (450)..(450): Xaa is Tyr or Val
  SITE (452)..(452): Xaa is Gln or Ser
  SITE (457)..(457): Xaa is Gln or Ser
  SITE (458)..(458): Xaa is Tyr or Val
  SITE (460)..(460): Xaa is Gln or Ser
  SITE (465)..(465): Xaa is Gln or Ser
  SITE (466)..(466): Xaa is Tyr or Val
  SITE (468)..(468): Xaa is Gln or Ser
  SITE (473)..(473): Xaa is Gln or Ser
  SITE (474)..(474): Xaa is Tyr or Val
  SITE (476)..(476): Xaa is Gln or Ser
  SITE (481)..(481): Xaa is Gln or Ser
  SITE (482)..(482): Xaa is Tyr or Val
  SITE (484)..(484): Xaa is Gln or Ser
  SITE (489)..(489): Xaa is Gln or Ser
  SITE (490)..(490): Xaa is Tyr or Val
  SITE (492)..(492): Xaa is Gln or Ser
  SITE (497)..(497): Xaa is Gln or Ser
  SITE (498)..(498): Xaa is Tyr or Val
  SITE (500)..(500): Xaa is Gln or Ser
  SITE (505)..(505): Xaa is Gln or Ser
  SITE (506)..(506): Xaa is Tyr or Val
  SITE (508)..(508): Xaa is Gln or Ser
  SITE (513)..(513): Xaa is Gln or Ser
  SITE (514)..(514): Xaa is Tyr or Val
  SITE (516)..(516): Xaa is Gln or Ser
  SITE (521)..(521): Xaa is Gln or Ser
  SITE (522)..(522): Xaa is Tyr or Val
  SITE (524)..(524): Xaa is Gln or Ser
  SITE (529)..(529): Xaa is Gln or Ser
  SITE (530)..(530): Xaa is Tyr or Val
  SITE (532)..(532): Xaa is Gln or Ser
  SITE (537)..(537): Xaa is Gln or Ser
  SITE (538)..(538): Xaa is Tyr or Val
  SITE (540)..(540): Xaa is Gln or Ser
  SITE (545)..(545): Xaa is Gln or Ser
  SITE (546)..(546): Xaa is Tyr or Val
  SITE (548)..(548): Xaa is Gln or Ser
  SITE (553)..(553): Xaa is Gln or Ser
  SITE (554)..(554): Xaa is Tyr or Val
  SITE (556)..(556): Xaa is Gln or Ser
  SITE (561)..(561): Xaa is Gln or Ser
  SITE (562)..(562): Xaa is Tyr or Val
  SITE (564)..(564): Xaa is Gln or Ser
  SITE (569)..(569): Xaa is Gln or Ser
  SITE (570)..(570): Xaa is Tyr or Val
  SITE (572)..(572): Xaa is Gln or Ser
  SITE (577)..(577): Xaa is Gln or Ser
  SITE (578)..(578): Xaa is Tyr or Val
  SITE (580)..(580): Xaa is Gln or Ser
  SITE (585)..(585): Xaa is Gln or Ser
  SITE (586)..(586): Xaa is Tyr or Val
  SITE (588)..(588): Xaa is Gln or Ser
  SITE (593)..(593): Xaa is Gln or Ser
  SITE (594)..(594): Xaa is Tyr or Val
  SITE (596)..(596): Xaa is Gln or Ser
  SITE (601)..(601): Xaa is Gln or Ser
  SITE (602)..(602): Xaa is Tyr or Val
  SITE (604)..(604): Xaa is Gln or Ser
  SITE (609)..(609): Xaa is Gln or Ser
  SITE (610)..(610): Xaa is Tyr or Val
  SITE (612)..(612): Xaa is Gln or Ser
  SITE (617)..(617): Xaa is Gln or Ser
  SITE (618)..(618): Xaa is Tyr or Val
  SITE (620)..(620): Xaa is Gln or Ser
  SITE (625)..(625): Xaa is Gln or Ser
  SITE (626)..(626): Xaa is Tyr or Val
  SITE (628)..(628): Xaa is Gln or Ser
  SITE (633)..(633): Xaa is Gln or Ser
  SITE (634)..(634): Xaa is Tyr or Val
  SITE (636)..(636): Xaa is Gln or Ser
  SITE (641)..(641): Xaa is Gln or Ser
  SITE (642)..(642): Xaa is Tyr or Val
  SITE (644)..(644): Xaa is Gln or Ser
  SITE (649)..(649): Xaa is Gln or Ser
  SITE (650)..(650): Xaa is Tyr or Val
  SITE (652)..(652): Xaa is Gln or Ser
  SITE (657)..(657): Xaa is Gln or Ser
  SITE (658)..(658): Xaa is Tyr or Val
  SITE (660)..(660): Xaa is Gln or Ser
  SITE (665)..(665): Xaa is Gln or Ser
  SITE (666)..(666): Xaa is Tyr or Val
  SITE (668)..(668): Xaa is Gln or Ser
  SITE (673)..(673): Xaa is Gln or Ser
  SITE (674)..(674): Xaa is Tyr or Val
  SITE (676)..(676): Xaa is Gln or Ser
  SITE (681)..(681): Xaa is Gln or Ser
  SITE (682)..(682): Xaa is Tyr or Val
  SITE (684)..(684): Xaa is Gln or Ser
  SITE (689)..(689): Xaa is Gln or Ser
  SITE (690)..(690): Xaa is Tyr or Val
  SITE (692)..(692): Xaa is Gln or Ser
  SITE (697)..(697): Xaa is Gln or Ser
  SITE (698)..(698): Xaa is Tyr or Val
  SITE (700)..(700): Xaa is Gln or Ser
  SITE (705)..(705): Xaa is Gln or Ser
  SITE (706)..(706): Xaa is Tyr or Val
  SITE (708)..(708): Xaa is Gln or Ser
  SITE (713)..(713): Xaa is Gln or Ser
  SITE (714)..(714): Xaa is Tyr or Val
  SITE (716)..(716): Xaa is Gln or Ser
  SITE (721)..(721): Xaa is Gln or Ser
  SITE (722)..(722): Xaa is Tyr or Val
  SITE (724)..(724): Xaa is Gln or Ser
  SITE (729)..(729): Xaa is Gln or Ser
  SITE (730)..(730): Xaa is Tyr or Val
  SITE (732)..(732): Xaa is Gln or Ser
  SITE (737)..(737): Xaa is Gln or Ser
  SITE (738)..(738): Xaa is Tyr or Val
  SITE (740)..(740): Xaa is Gln or Ser
  SITE (745)..(745): Xaa is Gln or Ser
  SITE (746)..(746): Xaa is Tyr or Val
  SITE (748)..(748): Xaa is Gln or Ser
  SITE (753)..(753): Xaa is Gln or Ser
  SITE (754)..(754): Xaa is Tyr or Val
  SITE (756)..(756): Xaa is Gln or Ser
  SITE (761)..(761): Xaa is Gln or Ser
  SITE (762)..(762): Xaa is Tyr or Val
  SITE (764)..(764): Xaa is Gln or Ser
  SITE (769)..(769): Xaa is Gln or Ser
  SITE (770)..(770): Xaa is Tyr or Val
  SITE (772)..(772): Xaa is Gln or Ser
  SITE (777)..(777): Xaa is Gln or Ser
  SITE (778)..(778): Xaa is Tyr or Val
  SITE (780)..(780): Xaa is Gln or Ser
  SITE (785)..(785): Xaa is Gln or Ser
  SITE (786)..(786): Xaa is Tyr or Val
  SITE (788)..(788): Xaa is Gln or Ser
  SITE (793)..(793): Xaa is Gln or Ser
  SITE (794)..(794): Xaa is Tyr or Val
  SITE (796)..(796): Xaa is Gln or Ser
  SITE (801)..(801): Xaa is Gln or Ser
  SITE (802)..(802): Xaa is Tyr or Val
  SITE (804)..(804): Xaa is Gln or Ser
  SITE (809)..(809): Xaa is Gln or Ser
  SITE (810)..(810): Xaa is Tyr or Val
  SITE (812)..(812): Xaa is Gln or Ser
  SITE (817)..(817): Xaa is Gln or Ser
  SITE (818)..(818): Xaa is Tyr or Val
  SITE (820)..(820): Xaa is Gln or Ser
  SITE (825)..(825): Xaa is Gln or Ser
  SITE (826)..(826): Xaa is Tyr or Val
  SITE (828)..(828): Xaa is Gln or Ser
  SITE (833)..(833): Xaa is Gln or Ser
  SITE (834)..(834): Xaa is Tyr or Val
  SITE (836)..(836): Xaa is Gln or Ser
  SITE (841)..(841): Xaa is Gln or Ser
  SITE (842)..(842): Xaa is Tyr or Val
  SITE (844)..(844): Xaa is Gln or Ser
  SITE (849)..(849): Xaa is Gln or Ser
  SITE (850)..(850): Xaa is Tyr or Val
  SITE (852)..(852): Xaa is Gln or Ser
  SITE (857)..(857): Xaa is Gln or Ser
  SITE (858)..(858): Xaa is Tyr or Val
  SITE (860)..(860): Xaa is Gln or Ser
  SITE (865)..(865): Xaa is Gln or Ser
  SITE (866)..(866): Xaa is Tyr or Val
  SITE (868)..(868): Xaa is Gln or Ser
  SITE (873)..(873): Xaa is Gln or Ser
  SITE (874)..(874): Xaa is Tyr or Val
  SITE (876)..(876): Xaa is Gln or Ser
  SITE (881)..(881): Xaa is Gln or Ser
  SITE (882)..(882): Xaa is Tyr or Val
  SITE (884)..(884): Xaa is Gln or Ser
  SITE (889)..(889): Xaa is Gln or Ser
  SITE (890)..(890): Xaa is Tyr or Val
  SITE (892)..(892): Xaa is Gln or Ser
  SITE (897)..(897): Xaa is Gln or Ser
  SITE (898)..(898): Xaa is Tyr or Val
  SITE (900)..(900): Xaa is Gln or Ser
  SITE (905)..(905): Xaa is Gln or Ser
  SITE (906)..(906): Xaa is Tyr or Val
  SITE (908)..(908): Xaa is Gln or Ser
  SITE (913)..(913): Xaa is Gln or Ser
  SITE (914)..(914): Xaa is Tyr or Val
  SITE (916)..(916): Xaa is Gln or Ser
  SITE (921)..(921): Xaa is Gln or Ser
  SITE (922)..(922): Xaa is Tyr or Val
  SITE (924)..(924): Xaa is Gln or Ser
  SITE (929)..(929): Xaa is Gln or Ser
  SITE (930)..(930): Xaa is Tyr or Val
  SITE (932)..(932): Xaa is Gln or Ser
  SITE (937)..(937): Xaa is Gln or Ser
  SITE (938)..(938): Xaa is Tyr or Val
  SITE (940)..(940): Xaa is Gln or Ser
  SITE (945)..(945): Xaa is Gln or Ser
  SITE (946)..(946): Xaa is Tyr or Val
  SITE (948)..(948): Xaa is Gln or Ser
  SITE (953)..(953): Xaa is Gln or Ser
  SITE (954)..(954): Xaa is Tyr or Val
  SITE (956)..(956): Xaa is Gln or Ser
  SITE (961)..(961): Xaa is Gln or Ser
  SITE (962)..(962): Xaa is Tyr or Val
  SITE (964)..(964): Xaa is Gln or Ser
  SITE (969)..(969): Xaa is Gln or Ser
  SITE (970)..(970): Xaa is Tyr or Val
  SITE (972)..(972): Xaa is Gln or Ser
  SITE (977)..(977): Xaa is Gln or Ser
  SITE (978)..(978): Xaa is Tyr or Val
  SITE (980)..(980): Xaa is Gln or Ser
  SITE (985)..(985): Xaa is Gln or Ser
  SITE (986)..(986): Xaa is Tyr or Val
  SITE (988)..(988): Xaa is Gln or Ser
  SITE (993)..(993): Xaa is Gln or Ser
  SITE (994)..(994): Xaa is Tyr or Val
  SITE (996)..(996): Xaa is Gln or Ser
  SITE (1001)..(1001): Xaa is Gln or Ser
  SITE (1002)..(1002): Xaa is Tyr or Val
  SITE (1004)..(1004): Xaa is Gln or Ser
  SITE (1009)..(1009): Xaa is Gln or Ser
  SITE (1010)..(1010): Xaa is Tyr or Val
  SITE (1012)..(1012): Xaa is Gln or Ser
  SITE (1017)..(1017): Xaa is Gln or Ser
  SITE (1018)..(1018): Xaa is Tyr or Val
  SITE (1020)..(1020): Xaa is Gln or Ser
  SITE (1025)..(1025): Xaa is Gln or Ser
  SITE (1026)..(1026): Xaa is Tyr or Val
  SITE (1028)..(1028): Xaa is Gln or Ser
  SITE (1033)..(1033): Xaa is Gln or Ser
  SITE (1034)..(1034): Xaa is Tyr or Val
  SITE (1036)..(1036): Xaa is Gln or Ser
  SITE (1041)..(1041): Xaa is Gln or Ser
  SITE (1042)..(1042): Xaa is Tyr or Val
  SITE (1044)..(1044): Xaa is Gln or Ser
  SITE (1049)..(1049): Xaa is Gln or Ser
  SITE (1050)..(1050): Xaa is Tyr or Val
  SITE (1052)..(1052): Xaa is Gln or Ser
  SITE (1057)..(1057): Xaa is Gln or Ser
  SITE (1058)..(1058): Xaa is Tyr or Val
  SITE (1060)..(1060): Xaa is Gln or Ser
  SITE (1065)..(1065): Xaa is Gln or Ser
  SITE (1066)..(1066): Xaa is Tyr or Val
  SITE (1068)..(1068): Xaa is Gln or Ser
  SITE (1073)..(1073): Xaa is Gln or Ser
  SITE (1074)..(1074): Xaa is Tyr or Val
  SITE (1076)..(1076): Xaa is Gln or Ser
  SITE (1081)..(1081): Xaa is Gln or Ser
  SITE (1082)..(1082): Xaa is Tyr or Val
  SITE (1084)..(1084): Xaa is Gln or Ser
  SITE (1089)..(1089): Xaa is Gln or Ser
  SITE (1090)..(1090): Xaa is Tyr or Val
  SITE (1092)..(1092): Xaa is Gln or Ser
  SITE (1097)..(1097): Xaa is Gln or Ser
  SITE (1098)..(1098): Xaa is Tyr or Val
  SITE (1100)..(1100): Xaa is Gln or Ser
  SITE (1105)..(1105): Xaa is Gln or Ser
  SITE (1106)..(1106): Xaa is Tyr or Val
  SITE (1108)..(1108): Xaa is Gln or Ser
  SITE (1113)..(1113): Xaa is Gln or Ser
  SITE (1114)..(1114): Xaa is Tyr or Val
  SITE (1116)..(1116): Xaa is Gln or Ser
  SITE (1121)..(1121): Xaa is Gln or Ser
  SITE (1122)..(1122): Xaa is Tyr or Val
  SITE (1124)..(1124): Xaa is Gln or Ser
  SITE (1129)..(1129): Xaa is Gln or Ser
  SITE (1130)..(1130): Xaa is Tyr or Val
  SITE (1132)..(1132): Xaa is Gln or Ser
  SITE (1137)..(1137): Xaa is Gln or Ser
  SITE (1138)..(1138): Xaa is Tyr or Val
  SITE (1140)..(1140): Xaa is Gln or Ser
  SITE (1145)..(1145): Xaa is Gln or Ser
  SITE (1146)..(1146): Xaa is Tyr or Val
  SITE (1148)..(1148): Xaa is Gln or Ser
  SITE (1153)..(1153): Xaa is Gln or Ser
  SITE (1154)..(1154): Xaa is Tyr or Val
  SITE (1156)..(1156): Xaa is Gln or Ser
  SITE (1161)..(1161): Xaa is Gln or Ser
  SITE (1162)..(1162): Xaa is Tyr or Val
  SITE (1164)..(1164): Xaa is Gln or Ser
  SITE (1169)..(1169): Xaa is Gln or Ser
  SITE (1170)..(1170): Xaa is Tyr or Val
  SITE (1172)..(1172): Xaa is Gln or Ser
  SITE (1177)..(1177): Xaa is Gln or Ser
  SITE (1178)..(1178): Xaa is Tyr or Val
  SITE (1180)..(1180): Xaa is Gln or Ser
  SITE (1185)..(1185): Xaa is Gln or Ser
  SITE (1186)..(1186): Xaa is Tyr or Val
  SITE (1188)..(1188): Xaa is Gln or Ser
  SITE (1193)..(1193): Xaa is Gln or Ser
  SITE (1194)..(1194): Xaa is Tyr or Val
  SITE (1196)..(1196): Xaa is Gln or Ser
  SITE (1201)..(1201): Xaa is Gln or Ser
  SITE (1202)..(1202): Xaa is Tyr or Val
  SITE (1204)..(1204): Xaa is Gln or Ser
  SITE (1209)..(1209): Xaa is Gln or Ser
  SITE (1210)..(1210): Xaa is Tyr or Val
  SITE (1212)..(1212): Xaa is Gln or Ser
  SITE (1217)..(1217): Xaa is Gln or Ser
  SITE (1218)..(1218): Xaa is Tyr or Val
  SITE (1220)..(1220): Xaa is Gln or Ser
  SITE (1225)..(1225): Xaa is Gln or Ser
  SITE (1226)..(1226): Xaa is Tyr or Val
  SITE (1228)..(1228): Xaa is Gln or Ser
  SITE (1233)..(1233): Xaa is Gln or Ser
  SITE (1234)..(1234): Xaa is Tyr or Val
  SITE (1236)..(1236): Xaa is Gln or Ser
  SITE (1241)..(1241): Xaa is Gln or Ser
  SITE (1242)..(1242): Xaa is Tyr or Val
  SITE (1244)..(1244): Xaa is Gln or Ser
  SITE (1249)..(1249): Xaa is Gln or Ser
  SITE (1250)..(1250): Xaa is Tyr or Val
  SITE (1252)..(1252): Xaa is Gln or Ser
  SITE (1257)..(1257): Xaa is Gln or Ser
  SITE (1258)..(1258): Xaa is Tyr or Val
  SITE (1260)..(1260): Xaa is Gln or Ser
  SITE (1265)..(1265): Xaa is Gln or Ser
  SITE (1266)..(1266): Xaa is Tyr or Val
  SITE (1268)..(1268): Xaa is Gln or Ser
  SITE (1273)..(1273): Xaa is Gln or Ser
  SITE (1274)..(1274): Xaa is Tyr or Val
  SITE (1276)..(1276): Xaa is Gln or Ser
XXPXDGRGXXPXDGRGXXPXDGRGXXPXDGRGXXPXDGRGXXPXDGRGXXPXDGRGXXPXDGRGXXPXDGRGXXPXDGRGXXPXDGRGXXPXDGRGXXPXDGRGXXPXDGRGXXPXDGRGXXPXDGRGXXPXDGRGXXPXDGRGXXPXDGRGXXPXDGRGXXPXDGRGXXPXDGRGXXPXDGRGXXPXDGRGXXPXDGRGXXPXDGRGXXPXDGRGXXPXDGRGXXPXDGRGXXPXDGRGXXPXDGRGXXPXDGRGXXPXDGRGXXPXDGRGXXPXDGRGXXPXDGRGXXPXDGRGXXPXDGRGXXPXDGRGXXPXDGRGXXPXDGRGXXPXDGRGXXPXDGRGXXPXDGRGXXPXDGRGXXPXDGRGXXPXDGRGXXPXDGRGXXPXDGRGXXPXDGRGXXPXDGRGXXPXDGRGXXPXDGRGXXPXDGRGXXPXDGRGXXPXDGRGXXPXDGRGXXPXDGRGXXPXDGRGXXPXDGRGXXPXDGRGXXPXDGRGXXPXDGRGXXPXDGRGXXPXDGRGXXPXDGRGXXPXDGRGXXPXDGRGXXPXDGRGXXPXDGRGXXPXDGRGXXPXDGRGXXPXDGRGXXPXDGRGXXPXDGRGXXPXDGRGXXPXDGRGXXPXDGRGXXPXDGRGXXPXDGRGXXPXDGRGXXPXDGRGXXPXDGRGXXPXDGRGXXPXDGRGXXPXDGRGXXPXDGRGXXPXDGRGXXPXDGRGXXPXDGRGXXPXDGRGXXPXDGRGXXPXDGRGXXPXDGRGXXPXDGRGXXPXDGRGXXPXDGRGXXPXDGRGXXPXDGRGXXPXDGRGXXPXDGRGXXPXDGRGXXPXDGRGXXPXDGRGXXPXDGRGXXPXDGRGXXPXDGRGXXPXDGRGXXPXDGRGXXPXDGRGXXPXDGRGXXPXDGRGXXPXDGRGXXPXDGRGXXPXDGRGXXPXDGRGXXPXDGRGXXPXDGRGXXPXDGRGXXPXDGRGXXPXDGRGXXPXDGRGXXPXDGRGXXPXDGRGXXPXDGRGXXPXDGRGXXPXDGRGXXPXDGRGXXPXDGRGXXPXDGRGXXPXDGRGXXPXDGRGXXPXDGRGXXPXDGRGXXPXDGRGXXPXDGRGXXPXDGRGXXPXDGRGXXPXDGRGXXPXDGRGXXPXDGRGXXPXDGRGXXPXDGRGXXPXDGRGXXPXDGRGXXPXDGRGXXPXDGRGXXPXDGRGXXPXDGRGXXPXDGRGXXPXDGRGXXPXDGRGXXPXDGRGXXPXDGRGXXPXDGRGXXPXDGRGXXPXDGRGXXPXDGRGXXPXDGRGXXPXDGRG

SEQ ID NO: 154 - protein, 320 aa, Artificial Sequence
  Elastin-like polypeptide
GRGDQPYQGRGDQPYQGRGDQPYQGRGDQPYQGRGDQPYQGRGDQPYQGRGDQPYQGRGDQPYQGRGDQPYQGRGDQPYQGRGDQPYQGRGDQPYQGRGDQPYQGRGDQPYQGRGDQPYQGRGDQPYQGRGDQPYQGRGDQPYQGRGDQPYQGRGDQPYQGRGDQPYQGRGDQPYQGRGDQPYQGRGDQPYQGRGDQPYQGRGDQPYQGRGDQPYQGRGDQPYQGRGDQPYQGRGDQPYQGRGDQPYQGRGDQPYQGRGDQPYQGRGDQPYQGRGDQPYQGRGDQPYQGRGDQPYQGRGDQPYQGRGDQPYQGRGDQPYQ

SEQ ID NO: 155 - protein, 400 aa, Artificial Sequence
  Elastin-like polypeptide
GVGVPGVGVPGVGVPGVGVPGVGVPGVGVPGVGVPGVGVPGVGVPGVGVPGVGVPGVGVPGVGVPGVGVPGVGVPGVGVPGVGVPGVGVPGVGVPGVGVPGVGVPGVGVPGVGVPGVGVPGVGVPGVGVPGVGVPGVGVPGVGVPGVGVPGVGVPGVGVPGVGVPGVGVPGVGVPGVGVPGVGVPGVGVPGVGVPGVGVPGVGVPGVGVPGVGVPGVGVPGVGVPGVGVPGVGVPGVGVPGVGVPGVGVPGVGVPGVGVPGVGVPGVGVPGVGVPGVGVPGVGVPGVGVPGVGVPGVGVPGVGVPGVGVPGVGVPGVGVPGVGVPGVGVPGVGVPGVGVPGVGVPGVGVPGVGVPGVGVPGVGVPGVGVPGVGVPGVGVPGVGVPGVGVPGVGVPGVGVP

SEQ ID NO: 156 - protein, 720 aa, Artificial Sequence
  Elastin-like polypeptide
GRGDQPYQGRGDQPYQGRGDQPYQGRGDQPYQGRGDQPYQGRGDQPYQGRGDQPYQGRGDQPYQGRGDQPYQGRGDQPYQGRGDQPYQGRGDQPYQGRGDQPYQGRGDQPYQGRGDQPYQGRGDQPYQGRGDQPYQGRGDQPYQGRGDQPYQGRGDQPYQGRGDQPYQGRGDQPYQGRGDQPYQGRGDQPYQGRGDQPYQGRGDQPYQGRGDQPYQGRGDQPYQGRGDQPYQGRGDQPYQGRGDQPYQGRGDQPYQGRGDQPYQGRGDQPYQGRGDQPYQGRGDQPYQGRGDQPYQGRGDQPYQGRGDQPYQGRGDQPYQGVGVPGVGVPGVGVPGVGVPGVGVPGVGVPGVGVPGVGVPGVGVPGVGVPGVGVPGVGVPGVGVPGVGVPGVGVPGVGVPGVGVPGVGVPGVGVPGVGVPGVGVPGVGVPGVGVPGVGVPGVGVPGVGVPGVGVPGVGVPGVGVPGVGVPGVGVPGVGVPGVGVPGVGVPGVGVPGVGVPGVGVPGVGVPGVGVPGVGVPGVGVPGVGVPGVGVPGVGVPGVGVPGVGVPGVGVPGVGVPGVGVPGVGVPGVGVPGVGVPGVGVPGVGVPGVGVPGVGVPGVGVPGVGVPGVGVPGVGVPGVGVPGVGVPGVGVPGVGVPGVGVPGVGVPGVGVPGVGVPGVGVPGVGVPGVGVPGVGVPGVGVPGVGVPGVGVPGVGVPGVGVPGVGVPGVGVPGVGVP

SEQ ID NO: 157 - protein, 12 aa, Artificial Sequence
  linker
GKSSGSGSESKS

SEQ ID NO: 158 - protein, 14 aa, Artificial Sequence
  linker
GSTSGSGKSSEGKG

SEQ ID NO: 159 - protein, 18 aa, Artificial Sequence
  linker
GSTSGSGKSSEGSGSTKG

SEQ ID NO: 160 - protein, 18 aa, Artificial Sequence
  linker
GSTSGSGKPGSGEGSTKG

SEQ ID NO: 161 - protein, 14 aa, Artificial Sequence
  linker
EGKSSGSGSESKEF

SEQ ID NO: 162 - protein, 5 aa, Artificial Sequence
  linker
SRSSG

SEQ ID NO: 163 - protein, 5 aa, Artificial Sequence
  linker
SGSSC

SEQ ID NO: 164 - protein, 18 aa, Artificial Sequence
  linker
EGRGSLLTCGDVEENPGP

SEQ ID NO: 165 - protein, 19 aa, Artificial Sequence
  linker
ATNFSLLKQAGDVEENPGP

SEQ ID NO: 166 - protein, 20 aa, Artificial Sequence
  linker
QCTNYALLKLAGDVESNPGP

SEQ ID NO: 167 - protein, 22 aa, Artificial Sequence
  linker
VKQTLNFDLLKLAGDVESNPGP

SEQ ID NO: 168 - protein, 3 aa, Artificial Sequence
  linker
GSG

SEQ ID NO: 169 - protein, 96 aa, Homo sapiens
NRPPIAIVSPQFQEISLPTTSTVIDGSQSTDDDKIVQYHWEELKGPLREEKISEDTAILKLSKLVPGNYTFSLTVVDSDGATNSTTANLTVNKAVD

SEQ ID NO: 170 - protein, 400 aa, Artificial Sequence
  Elastin-like polypeptide
GVGVPGLGVPGVGVPGLGVPGVGVPGVGVPGLGVPGVGVPGLGVPGVGVPGVGVPGLGVPGVGVPGLGVPGVGVPGVGVPGLGVPGVGVPGLGVPGVGVPGVGVPGLGVPGVGVPGLGVPGVGVPGVGVPGLGVPGVGVPGLGVPGVGVPGVGVPGLGVPGVGVPGLGVPGVGVPGVGVPGLGVPGVGVPGLGVPGVGVPGVGVPGLGVPGVGVPGLGVPGVGVPGVGVPGLGVPGVGVPGLGVPGVGVPGVGVPGLGVPGVGVPGLGVPGVGVPGVGVPGLGVPGVGVPGLGVPGVGVPGVGVPGLGVPGVGVPGLGVPGVGVPGVGVPGLGVPGVGVPGLGVPGVGVPGVGVPGLGVPGVGVPGLGVPGVGVPGVGVPGLGVPGVGVPGLGVPGVGVP

SEQ ID NO: 171 - protein, 505 aa, Artificial Sequence
  Purification Matrix
MSKGPGVGVPGLGVPGVGVPGLGVPGVGVPGVGVPGLGVPGVGVPGLGVPGVGVPGVGVPGLGVPGVGVPGLGVPGVGVPGVGVPGLGVPGVGVPGLGVPGVGVPGVGVPGLGVPGVGVPGLGVPGVGVPGVGVPGLGVPGVGVPGLGVPGVGVPGVGVPGLGVPGVGVPGLGVPGVGVPGVGVPGLGVPGVGVPGLGVPGVGVPGVGVPGLGVPGVGVPGLGVPGVGVPGVGVPGLGVPGVGVPGLGVPGVGVPGVGVPGLGVPGVGVPGLGVPGVGVPGVGVPGLGVPGVGVPGLGVPGVGVPGVGVPGLGVPGVGVPGLGVPGVGVPGVGVPGLGVPGVGVPGLGVPGVGVPGVGVPGLGVPGVGVPGLGVPGVGVPGVGVPGLGVPGVGVPGLGVPGVGVPGNRPPIAIVSPQFQEISLPTTSTVIDGSQSTDDDKIVQYHWEELKGPLREEKISEDTAILKLSKLVPGNYTFSLTVVDSDGATNSTTANLTVNKAVDYPG

SEQ ID NO: 172 - protein, 505 aa, Artificial Sequence
  Purification Matrix
MSKGPGVGVPGVGVPGVGVPGVGVPGVGVPGVGVPGVGVPGVGVPGVGVPGVGVPGVGVPGVGVPGVGVPGVGVPGVGVPGVGVPGVGVPGVGVPGVGVPGVGVPGVGVPGVGVPGVGVPGVGVPGVGVPGVGVPGVGVPGVGVPGVGVPGVGVPGVGVPGVGVPGVGVPGVGVPGVGVPGVGVPGVGVPGVGVPGVGVPGVGVPGVGVPGVGVPGVGVPGVGVPGVGVPGVGVPGVGVPGVGVPGVGVPGVGVPGVGVPGVGVPGVGVPGVGVPGVGVPGVGVPGVGVPGVGVPGVGVPGVGVPGVGVPGVGVPGVGVPGVGVPGVGVPGVGVPGVGVPGVGVPGVGVPGVGVPGVGVPGVGVPGVGVPGVGVPGVGVPGVGVPGVGVPGVGVPGVGVPGVGVPGNRPPIAIVSPQFQEISLPTTSTVIDGSQSTDDDKIVQYHWEELKGPLREEKISEDTAILKLSKLVPGNYTFSLTVVDSDGATNSTTANLTVNKAVDYPG

SEQ ID NO: 173 - protein, 505 aa, Artificial Sequence
  Purification Matrix
MSKGPGVGVPGVGVPGAGVPGVGVPGVGVPGVGVPGVGVPGAGVPGVGVPGVGVPGVGVPGVGVPGAGVPGVGVPGVGVPGVGVPGVGVPGAGVPGVGVPGVGVPGVGVPGVGVPGAGVPGVGVPGVGVPGVGVPGVGVPGAGVPGVGVPGVGVPGVGVPGVGVPGAGVPGVGVPGVGVPGVGVPGVGVPGAGVPGVGVPGVGVPGVGVPGVGVPGAGVPGVGVPGVGVPGVGVPGVGVPGAGVPGVGVPGVGVPGVGVPGVGVPGAGVPGVGVPGVGVPGVGVPGVGVPGAGVPGVGVPGVGVPGVGVPGVGVPGAGVPGVGVPGVGVPGVGVPGVGVPGAGVPGVGVPGVGVPGVGVPGVGVPGAGVPGVGVPGVGVPGVGVPGVGVPGAGVPGVGVPGVGVPGNRPPIAIVSPQFQEISLPTTSTVIDGSQSTDDDKIVQYHWEELKGPLREEKISEDTAILKLSKLVPGNYTFSLTVVDSDGATNSTTANLTVNKAVDYPG

SEQ ID NO: 174 - protein, 501 aa, Artificial Sequence
  Purification Matrix
MGVGVPGLGVPGVGVPGLGVPGVGVPGVGVPGLGVPGVGVPGLGVPGVGVPGVGVPGLGVPGVGVPGLGVPGVGVPGVGVPGLGVPGVGVPGLGVPGVGVPGVGVPGLGVPGVGVPGLGVPGVGVPGVGVPGLGVPGVGVPGLGVPGVGVPGVGVPGLGVPGVGVPGLGVPGVGVPGVGVPGLGVPGVGVPGLGVPGVGVPGVGVPGLGVPGVGVPGLGVPGVGVPGVGVPGLGVPGVGVPGLGVPGVGVPGVGVPGLGVPGVGVPGLGVPGVGVPGVGVPGLGVPGVGVPGLGVPGVGVPGVGVPGLGVPGVGVPGLGVPGVGVPGVGVPGLGVPGVGVPGLGVPGVGVPGVGVPGLGVPGVGVPGLGVPGVGVPGVGVPGLGVPGVGVPGLGVPGVGVPGNRPPIAIVSPQFQEISLPTTSTVIDGSQSTDDDKIVQYHWEELKGPLREEKISEDTAILKLSKLVPGNYTFSLTVVDSDGATNSTTANLTVNKAVDYPG

What is claimed is:

1. A purification matrix comprising an AAV-binding polypeptide coupled to a polypeptide having phase behavior, wherein the AAV-binding polypeptide comprises the ectodomain of the AAV receptor (AAVR), or an AAV-binding fragment or derivative thereof.

2. The purification matrix of claim 1, wherein the AAVR is a human, monkey, orangutan, or mouse AAVR, or a derivative thereof.

3. The purification matrix of claim 1, wherein the AAV-binding polypeptide comprises any one of SEQ ID NOs: 28-32, 37-41, 43-47, and 52-86.

4. The purification matrix of claim 1, wherein the AAV-binding polypeptide comprises the sequence of any one of SEQ ID NOs: 29, 33, 52, 64, or a sequence that comprises up to 25 amino acid mutations relative to any one of SEQ ID NOs: 29, 33, 52, or 64.

5. The purification matrix of claim 1, wherein the AAV-binding polypeptide comprises a polycystic kidney disease 2 (PKD2) domain, or a fragment thereof.

6. The purification matrix of any one of claims 1-5, wherein the AAV binding polypeptide is reversibly coupled to the polypeptide having phase behavior.

7. The purification matrix of any one of claims 1-5, wherein the AAV binding polypeptide is covalently coupled to the polypeptide having phase behavior.

8. The purification matrix of any one of claims 1-7, wherein the polypeptide with phase behavior is an elastin-like polypeptide.

9. The purification matrix of any one of claims 1-7, wherein the polypeptide with phase behavior comprises a pentapeptide repeat having the sequence (Val-Pro-Gly-Xaa-Gly)ₙ (SEQ ID NO: 10), or a randomized, scrambled analog thereof; wherein Xaa can be any amino acid except proline, wherein n is an integer between 1 and 360, inclusive of endpoints.

10. The purification matrix of any one of claims 1-8, wherein the polypeptide with phase behavior comprises an amino acid sequence selected from:
a. (GRGDSPY)ₙ (SEQ ID NO: 1)
b. (GRGDSPH)ₙ (SEQ ID NO: 2)
c. (GRGDSPV)ₙ (SEQ ID NO: 3)
d. (GRGDSPYG)ₙ (SEQ ID NO: 4)
e. (RPLGYDS)ₙ (SEQ ID NO: 5)
f. (RPAGYDS)ₙ (SEQ ID NO: 6)
g. (ZZPXXXXGZ)ₘ(SEQ ID NO: 148);
h. (GRGDSYP)ₙ (SEQ ID NO: 7)
i. (GRGDSPYQ)ₙ (SEQ ID NO: 8)
j. (GRGNSPYG)ₙ (SEQ ID NO: 9)
k. (GVGVP)ₙ (SEQ ID NO: 11);
l. (GVGVPGLGVPGVGVPGLGVPGVGVP)ₘ (SEQ ID NO: 12);
m. (GVGVPGVGVPGAGVPGVGVPGVGVP)ₘ (SEQ ID NO: 13);
n. (GVGVPGWGVPGVGVPGWGVPGVGVP)ₘ (SEQ ID NO: 14);
o. (GVGVPGVGVPGVGVPGVGVPGVGVPGVGVPGEGVPGFGVPGVGVP)ₘ (SEQ ID NO: 15);
p. (GVGVPGVGVPGVGVPGVGVPGVGVPGVGVPGKGVPGFGVPGVGVP)ₘ (SEQ ID NO: 16); and
q. (GAGVPGVGVPGAGVPGVGVPGAGVP)ₘ (SEQ ID NO: 17); or a randomized, scrambled analog thereof;
wherein:
n is an integer in the range of 20-360; and
m is an integer in the range of 4-25.

11. The purification matrix of any one of claims 1-8, wherein the polypeptide with phase behavior comprises an amino acid sequence selected from:
(a) (GVGVP)ₘ(SEQ ID NO: 143);
(b) (ZZPXGZ)ₘ(SEQ ID NO: 149);
(c) (ZZPXXGZ)ₘ (SEQ ID NO: 150); or
(d) (ZZPXXXGZ)ₘ (SEQ ID NO: 151),
wherein m is an integer between 10 and 160, inclusive of endpoints, wherein X if present is any amino acid except proline or glycine, and wherein Z if present is any amino acid.

12. The purification matrix of any one of claims 1-8, wherein the polypeptide with phase behavior comprises an amino acid sequence selected from:
(a) (GVGVPGVGVPGAGVPGVGVPGVGVP)ₘ(SEQ ID NO: 144); or
(b) (GVGVPGVGVPGLGVPGVGVPGVGVP)ₘ (SEQ ID NO: 146);
wherein m is an integer between 2 and 32, inclusive of endpoints.

13. The purification matrix of any one of claims 1-8, wherein the polypeptide with phase behavior comprises an amino acid sequence selected from:
(a) (GVGVPGVGVPGAGVPGVGVPGVGVP)ₘ(SEQ ID NO: 144), wherein m is 8 or 16;
(b) (GVGVPGAGVP)ₘ(SEQ ID NO: 145), wherein m is an integer between 5 and 80, inclusive of endpoints; or
(c) (GXGVP)ₘ(SEQ ID NO: 147), wherein m is an integer between 10 and 160, inclusive of endpoints, and wherein X for each repeat is independently selected from the group consisting of glycine, alanine, valine, isoleucine, leucine, phenylalanine, tyrosine, tryptophan, lysine, arginine, aspartic acid, glutamic acid, and serine.

14. The purification matrix of any one of claims 1 to 8, wherein the purification matrix comprises an AAV binding polypeptide having an amino acid sequence of SEQ ID NO: 29, SEQ ID NO: 52, or SEQ ID NO: 64 and a polypeptide with phase behavior comprising an amino acid of SEQ ID NO: 88 or a sequence of (GVGVPGLGVPGVGVPGLGVPGVGVP)ₘ, wherein m is 16 (SEQ ID NO: 12).

15. The purification matrix of any one of claims 1 to 8, wherein the purification matrix comprises an amino acid sequence of any one of SEQ ID NOs: 87 and 171-174.

16. The purification matrix of claim 15, wherein the purification matrix comprises an amino acid sequence of SEQ ID NO: 171.

17. The purification matrix of claim 15, wherein the purification matrix comprises a polypeptide with phase behavior having an amino acid sequence of SEQ ID NO: 170 and an AAV binding polypeptide of SEQ ID NO: 169.

18. A method for purifying an AAV particle, the method comprising contacting the AAV particle with the purification matrix of any one of claims 1-17.

19. The method of claim 18, wherein the AAV particle comprises a capsid protein of any one of the following serotypes: AAV1, AAV2, AAV3, AAV4, AAV5, AAV6, AAV7, AAV8, AAV9, AAV10, AAV11, AAV12, AAVrh8, AAVrh10, AAVrh32.33, AAVrh74, Avian AAV or Bovine AAV.

20. The method of any one of claims 18 or 19, wherein the AAV particle reversibly binds to the purification matrix to form an AAV-purification matrix complex.

21. The method of any one of claims 18-20, wherein the method comprises using a first environmental factor to increase the size of the AAV-purification matrix complex, wherein the first environmental factor comprises one or more of:
a. a change in one or more of temperature, pH, salt concentration or pressure;
b. the addition of one or more surfactants, cofactors, vitamins, molecular crowding agents, enzymes, denaturing agents; or
c. the application of electromagnetic or acoustic waves.

22. The method of any one of claims 18-20, wherein the method comprises separating the AAV-purification matrix complex from at least one impurity on the basis of size using a technique selected from the group consisting of tangential flow filtration, analytical ultracentrifugation, membrane chromatography, high performance liquid chromatography, normal flow filtration, acoustic wave separation, centrifugation, counterflow centrifugation, and fast protein liquid chromatography.

23. The method of any one of claims 18-22, wherein a second environmental factor is used to elute the AAV particle from the AAV-purification matrix complex, wherein the second environmental factor comprises one or more of:
a. a change in one or more of temperature, pH, salt concentration or pressure;
b. the addition of one or more surfactants, cofactors, vitamins, molecular crowding agents, denaturing agents, enzymes; or
c. the application of electromagnetic or acoustic waves.

24. An AAV binding polypeptide comprising the sequence of any one of SEQ ID NOs: 28-47, 52, 64, or 169 or a sequence with at least one mutation relative to any one of SEQ ID NOs: 28-47, 52, 64, or 169.

25. A nucleic acid encoding the AAV binding polypeptide of claim 24.

26. A vector comprising the nucleic acid of claim 25.

27. A composition comprising the AAV binding polypeptide of claim 24, the nucleic acid of claim 25, the vector of claim 26, or combinations thereof.

28. A method of increasing yield of AAV particles during production thereof, the method comprising culturing AAV-producing cells in the presence of a purification matrix.

29. A method of stabilizing AAV particles during production thereof, the method comprising culturing AAV-producing cells in the presence of a purification matrix.

30. A method of stabilizing AAV particles during purification thereof, the method comprising contacting the AAV particles with a purification matrix during purification thereof.

31. A method of stabilizing AAV particles during storage thereof, the method comprising storing the AAV particles in the presence of a purification matrix.

32. A method of increasing the shelf-life of AAV particles, the method comprising storing the AAV particles in the presence of a purification matrix.

33. The method of any one of claims 28-32, wherein the purification matrix is the purification matrix of any one of claims 1-17.

34. The method of claim 33, wherein at least about 10 μM of purification matrix is present.

35. The method of any one of claims 28-34, wherein the AAV particles are wildtype AAV particles of any one of the following serotypes: AAV1, AAV2, AAV3, AAV4, AAV5, AAV6, AAV7, AAV8, AAV9, AAV10, AAV11, AAV12, AAVrh8, AAVrh10, AAVrh32.33, AAVrh74, Avian AAV or Bovine AAV.

36. The method of any one of claims 28-34, wherein the AAV particles are mutant AAV particles.

37. The method of any one of claims 28-34, wherein the AAV particles reversibly bind to the purification matrix to form an AAV-purification matrix complex.
